(19) United States
(12) Patent Application Publication
(10) Pub. No.: US 2026/0097106 A1
(43) Pub. Date: Apr. 9, 2026

(54) AVIRULENT LIVE BACTERIAL VACCINES CURED OF PLASMIDS CONTAINING ANTIMICROBIAL RESISTANCE GENES

(71) Applicant: Drs. Koehnk & Feldman, LLP, Jewell, IA (US)

(72) Inventors: Hans Koehnk, Jewell, IA (US); Larry Koehnk, Jewell, IA (US)

(21) Appl. No.: 19/113,283

(22) PCT Filed: Sep. 19, 2023
(86) PCT No.: PCT/US2023/074622

§ 371 Date: Mar. 19, 2025

Related U.S. Application Data
(60) Provisional application No. 63/376,283, filed on Sep. 19, 2022.

(51) Int. Cl. A61K 39/108; A61K 39/00; C12N 15/70

(52) U.S. Cl. CPC A61K 39/0258; C12N 15/70; A61K 2039/522

(57) ABSTRACT

A vaccine comprising a live avirulent strain of bacteria or an immunogenic composition that comprises a live avirulent strain of bacteria, wherein the bacteria is cured of plasmids and/or transposons that contain AMR genes, and a non-conjugative synthetic curing plasmid that cures plasmids and/or transposons that contain AMR genes from such bacteria. A method for producing the live avirulent strain of bacteria or an immunogenic composition that comprises a live avirulent strain of bacteria; a method for treating, preventing, or reducing the severity, duration, or incidence of clinical signs, of a virulent bacterial infection; and a method for preventing, or reducing the risk or incidence of transference of AMR genes are also disclosed.

### STATEMENT REGARDING FEDERALLY SPONSORED RESEARCH & DEVELOPMENT

[0001] None.

### FIELD OF THE DISCLOSURE

[0002] The field of the disclosure relates generally to immunogenic compositions effective at treating or preventing, or reducing the incidence, severity, frequency, and/or duration of clinical signs of diseases caused by or associated with virulent Escherichia coli (E. coli) bacteria and/or virulent E. coli bacterial infection. More specifically, the disclosure relates to live avirulent E. coli vaccines that have been cured of plasmids and/or transposons that contain antimicrobial resistance (AMR) genes.

### BACKGROUND OF THE DISCLOSURE

[0003] Virulent E. coli infections lead to various clinical symptoms and pathogenicity in domesticated agricultural animals, including porcine and bovine varieties, primarily dependent on the serotype of the bacteria and the adherence factors (fimbriae) and toxins, which are often encoded on plasmid DNA (Nagy, Bela, et al., Genetic Diversity among Escherichia coli Isolates Carrying F18 Genes from Pigs with Porcine Postweaning Diarrhea and Edema Disease, Journal of Clinical Microbiology, 37, 5, 1642-45 (1999) (“Nagy, et al.”). Diarrhea and edema are major health problems for porcine and bovine producers that substantially affect swine, poultry and cattle production and results in significant financial losses (Nagy, et al.; Gyles, Carlton L., Overview of Edema Disease, Generalized Conditions, Merck Veterinary Manual, Professional Version, last modified June 2016 (2022) (“Gyles”)). E. coli strains that cause porcine postweaning diarrhea often express an F4 fimbrial adhesin responsible for bacterial attachment to the swine intestine and secrete enterotoxins that cause diarrhea, including the prevalent K88 strain of E. coli (Nagy, et al.; Daudelin, Jean-Fancois, et al., Administration of probiotics influences F4 (K88)-positive enterotoxigenic Escherichia coli Attachment and Intestinal Cytokine Expression in Weaned Pigs, Veterinary Research, 42, 69 (2011)) (“Daudelin, et al.”). Strains that cause edema disease in swine often lack expression of F4, and rather express F18 fimbrial adhesin and produce a Shiga or Shiga-like toxin that causes damage to vascular endothelium, resulting in edema, hemorrhage, intravascular coagulation, and microthrombosis, although certain F18 variants can also be enterotoxigenic (Nagy, et al.; Gyles).

[0004] While antimicrobials have enabled successful treatment of infections for years, the overuse and misuse of antimicrobials has led to AMR that health organizations have highlighted as a global health threat (Micoli, Francesca, et al., The Role of Vaccines in Combatting Antimicrobial Resistance, Nature Reviews Microbiology, 19, 287-302 (2021)). Increased concern of AMR gene transfer from the microflora of domestic animals to other bacteria, especially pathogenic bacteria that affect humans, has caused pressure for domestic agricultural producers to consider methods to reduce the risks of transfer of AMR genes (Nagy, et al.). Potential ways organisms containing AMR genes can be exposed to humans include through the human food supply of meat exposed to fecal contamination during slaughter and contaminated feces used as fertilizer. Another potential source of AMR genes with potential for transference is provided with live avirulent vaccines, including E. coli vaccines, that contain AMR genes in their plasmids and/or transposons. However, live bacterial vaccines generally provide a longer lasting immunity than nonviable alternatives. Additionally, orally-administered live bacterial vaccines provide targeted mucosal immunity, as the route of inoculation mimics the route of intestinal E. coli infections in animals. Accordingly, there is a need for live avirulent microbial vaccines that do not contain AMR genes in their plasmids and/or transposons. Such products would provide the important financial and production benefits for swine and cattle producers, and health benefits for swine, cattle, and consumers, without the added risk of transferring AMR genes through plasmids and/or transposons contained in the currently marketed vaccines.

### BRIEF DESCRIPTION OF THE DISCLOSURE

[0005] The present disclosure is directed to a vaccine comprising a live avirulent strain of bacteria or an immunogenic composition that comprises a live avirulent strain of bacteria, wherein the bacteria is cured of plasmids and/or transposons that contain at least one AMR gene. In some forms, the bacteria is cured of plasmids and/or transposons that contain 2, 3, 4, 5, 6, 7, 8, 9, 10, 11, 12, 13, 14, 15, 16, 17, 18, 19, or more AMR genes. In some forms, the bacteria is a Gram negative bacteria. In some forms, the bacteria is E. coli. In some forms, the bacteria is an E. coli strain or strains selected from the group consisting of an F18 fimbrial adhesin positive strain, an F4 fimbrial adhesin positive strain, or any combination thereof. In some forms, the bacteria is an E. coli strain that is F18 fimbrial adhesin positive. In some forms, the bacteria is an E. coli strain that is F4 fimbrial adhesin positive. In some forms, the bacteria is cured of at least one virulence gene. In some forms, the virulence gene is astA. In some forms, the bacteria is cured of at least one AMR gene. In some forms, the at least one AMR gene is from an F18 fimbrial adhesin positive strain. In some forms, the at least one AMR gene from the F18 fimbrial adhesin positive strain is selected from the group consisting of cm1A1, sul3, sul2, aph(4)-Ia, aac(3)-IV, aph(6)-Id, aadA2b, aph(3″)-Ib, aadA1, and any combination thereof. In some forms, the cm1A1 gene has at least 90, 91, 92, 93, 94, 95, 96, 97, 98, 99, 99.5, 99.6, 99.7, 99.8, 99.9, or 100% sequence identity or homology with SEQ ID NO. 1. In some forms, the sul3 gene has at least 90, 91, 92, 93, 94, 95, 96, 97, 98, 99, 99.5, 99.6, 99.7, 99.8, 99.9, or 100% sequence identity or homology with SEQ ID NO. 2. In some forms, the sul2 gene has at least 90, 91, 92, 93, 94, 95, 96, 97, 98, 99, 99.5, 99.6, 99.7, 99.8, 99.9, or 100% sequence identity or homology with SEQ ID NO. 3. In some forms, the aph(4)-Ia gene has at least 90, 91, 92, 93, 94, 95, 96, 97, 98, 99, 99.5, 99.6, 99.7, 99.8, 99.9, or 100% sequence identity or homology with SEQ ID NO. 4. In some forms, the aac(3)-IV gene has at least 90, 91, 92, 93, 94, 95, 96, 97, 98, 99, 99.5, 99.6, 99.7, 99.8, 99.9, or 100% sequence identity or homology with SEQ ID NO. 5. In some forms, the cm1A1 gene has at least 90, 91, 92, 93, 94, 95, 96, 97, 98, 99, 99.5, 99.6, 99.7, 99.8, 99.9, or 100% sequence identity or homology with SEQ ID NO. 1. In some forms, the aph(6)-Id gene has at least 90, 91, 92, 93, 94, 95, 96, 97, 98, 99, 99.5, 99.6, 99.7, 99.8, 99.9, or 100% sequence identity or homology with SEQ ID NO. 6. In some forms, the aadA2b gene has at least 90, 91, 92, 93, 94, 95, 96, 97, 98, 99, 99.5, 99.6, 99.7, 99.8, 99.9, or 100% sequence identity or homology with SEQ ID NO. 7. In some forms, the aph(3″)-Ib gene has at least 90, 91, 92, 93, 94, 95, 96, 97, 98, 99, 99.5, 99.6, 99.7, 99.8, 99.9, or 100% sequence identity or homology with SEQ ID NO. 8. In some forms, the aadA1 gene has at least 90, 91, 92, 93, 94, 95, 96, 97, 98, 99, 99.5, 99.6, 99.7, 99.8, 99.9, or 100% sequence identity or homology with SEQ ID NO. 9. In some forms, the at least one AMR gene is from an F4 fimbrial adhesin positive strain. In some forms, the F4 fimbrial positive strain is the K88 strain of E. coli. In some forms, the at least one AMR gene from the F18 fimbrial adhesin positive strain is selected from the group consisting of cm1A1, mdf(A), mef(B), aadA2b, aph(3′)-Ia, aadA1, sul3, and any combination thereof. In some forms, the mdf(A) (or MDFA) gene has at least 90, 91, 92, 93, 94, 95, 96, 97, 98, 99, 99.5, 99.6, 99.7, 99.8, 99.9, or 100% sequence identity or homology with SEQ ID NO. 10. In some forms, the mef(B) gene has at least 90, 91, 92, 93, 94, 95, 96, 97, 98, 99, 99.5, 99.6, 99.7, 99.8, 99.9, or 100% sequence identity or homology with SEQ ID NO. 11. In some forms, the aph(3′)-IA gene has at least 90, 91, 92, 93, 94, 95, 96, 97, 98, 99, 99.5, 99.6, 99.7, 99.8, 99.9, or 100% sequence identity or homology with SEQ ID NO. 12. In some forms, the bacteria is both F18 and F4 adhesin positive. In some forms, the bacteria is cured of at least one AMR gene selected from the group consisting of cm1A1, sul3, sul2, aph(4)-Ia, aac(3)-IV, aph(6)-Id, aadA2b, aph(3″)-Ib, aadA1, mdf(A), mef(B), aadA2b, aph(3′)-Ia, and any combination thereof.

[0006] A reference strain of E. coli that is F18 fimbrial positive is provided herein as SEQ ID NO. 13. A reference strain of K88 E. coli is provided herein as SEQ ID NO. 14.

[0007] In some forms, the bacteria is an E. coli strain with a genome that has at least 90, 91, 92, 93, 94, 95, 96, 97, 98, 99, 99.1, 99.2, 99.3, 99.4, 99.5, 99.6, 99.7, 99.8, 99.9 or even 100% sequence homology and/or identity with the sequence that can be elaborated by SEQ ID NOS. 17-164, which are the contigs or nodes of an F18 fimbrial positive strain that is cured of at least one AMR gene. In some forms, the F18 fimbrial positive strain is the same strain that is in the Edema Vac vaccine (ARKO Laboratories, Jewell, IA). In some forms, the E. coli F18 fimbrial positive strain that is cured of at least one AMR gene as described above is the same strain as is in the Edema Vac vaccine after it has been cured of the AMR genes after exposure to a curing plasmid, such as the curing plasmid of SEQ ID NO. 15 or 16. In some forms, the contigs or nodes of the cured E coli virus are represented by SEQ ID NOS. 17-164. In some forms, the bacteria is a K88 E. coli strain with a genome that has at least 90, 91, 92, 93, 94, 95, 96, 97, 98, 99, 99.1, 99.2, 99.3, 99.4, 99.5, 99.6, 99.7, 99.8, 99.9 or even 100% sequence homology and/or identity with the sequence of the E. coli virus included in the Entero Vac vaccine, which is a known as a K88 strain. In some forms, the sequence elaborated by the contigs or nodes of SEQ ID NOS: 165-672 represents the Entero Vac strain after it exposure and/or contact with a curing plasmid, such as the curing plasmid of SEQ ID NO. 15 or 16. In preferred forms, the virus of either Edema Vac or Entero Vac has been cured of at least one AMR gene selected from the group consisting of cm1A1, sul3, sul2, aph(4)-Ia, aac(3)-IV, aph(6)-Id, aadA2b, aph(3″)-Ib, aadA1, mdf(A), mef(B), aadA2b, aph(3′)-Ia, and any combination thereof.

[0008] The present disclosure is also directed to a non-conjugative synthetic curing plasmid that is designed to cure plasmids and/or transposons that contain AMR genes from a live avirulent strain of bacteria or an immunogenic composition that comprises a live avirulent strain of bacteria, wherein the bacteria or immunogenic composition is a vaccine. In some forms, the non-conjugative synthetic curing plasmid includes incompatibility and/or addiction elements that are the same as the incompatibility and/or addiction elements contained in the plasmids and/or transposons that are cured from the bacteria described above that contains AMR genes prior to being subjected to the curing process described herein. In some forms, the curing plasmid removes at least 1, 2, 3, 4, 5, 6, 7, 8, 9, 10, 11, 12, 13, 14, 15, 16, 17, 18, 19, 20 or more antimicrobial resistance genes that are contained in the plasmids and/or transposons of the bacteria prior to being cured from the bacteria. In some forms, the plasmid comprises at least 1, 2, 3, 4, 5, 6, 7, 8, 9, 10, or more negative growth selection genes. In some forms, the curing plasmid has at least 90, 91, 92, 93, 94, 95, 96, 97, 98, 99, 99.1, 99.2, 99.3, 99.4, 99.5, 99.6, 99.7, 99.8, 99.9 or even 100% sequence homology and/or identity with SEQ ID NO: 15. In some forms, the curing plasmid has at least 90, 91, 92, 93, 94, 95, 96, 97, 98, 99, 99.1, 99.2, 99.3, 99.4, 99.5, 99.6, 99.7, 99.8, 99.9 or even 100% sequence homology and/or identity with SEQ ID NO: 16.

[0009] The present disclosure also provides a method for producing a vaccine or immunogenic composition as described herein generally using the methodology described in U.S. Pat. No. 8,877,502. In some forms, the method generally includes transforming a live avirulent bacteria with a curing plasmid designed to cure plasmids and/or transposons that contain antimicrobial resistance genes from the live avirulent bacteria, and selecting for live avirulent bacteria that are cured of plasmids and/or transposons that contain antimicrobial resistance genes. In some forms, the live avirulent bacteria is an E. coli strain with a genome that has at least 90, 91, 92, 93, 94, 95, 96, 97, 98, 99, 99.1, 99.2, 99.3, 99.4, 99.5, 99.6, 99.7, 99.8, 99.9 or even 100% sequence homology with SEQ ID NO: 13 or SEQ ID NO: 14. In some forms, the curing plasmid has at least 90, 91, 92, 93, 94, 95, 96, 97, 98, 99, 99.1, 99.2, 99.3, 99.4, 99.5, 99.6, 99.7, 99.8, 99.9 or even 100% sequence homology to SEQ ID NO: 15 or SEQ ID NO: 16, respectively. In preferred forms, the bacteria has been cured of at least one AMR gene selected from the group consisting of cm1A1, sul3, sul2, aph(4)-Ia, aac(3)-IV, aph(6)-Id, aadA2b, aph(3″)-Ib, aadA1, mdf(A), mef(B), aadA2b, aph(3′)-Ia, and any combination thereof.

[0010] The present disclosure further provides methods of treating, preventing, or reducing the severity, duration, or incidence of clinical signs, of a virulent bacterial infection comprising administering the vaccine or immunogenic composition described herein to a mammal. In some forms, the bacteria in the vaccine is an E. coli strain or strains selected from the group consisting of an F18 fimbrial adhesin positive strain, and F4 fimbrial adhesin positive strain, or a combination thereof. In some forms, the mammal is selected from the group of swine and cattle. In some forms, administration of the vaccine or immunogenic composition described herein results in a decrease in the severity, duration, or incidence of clinical signs in comparison to an animal or group of animals that has not received at least one administration of the vaccine or immunogenic composition. In some forms, the decrease is at least 10, 20, 30, 40, 50, 60, 70, 80, 85, 90, 95, or even 100% in comparison to an animal or group of animals that did not receive at least one administration of the vaccine or immunogenic composition described herein.

[0011] The present disclosure further provides methods of preventing, or reducing the risk or incidence of, transference of antimicrobial resistance genes from a live avirulent bacterial vaccine to human pathogens generally comprising administering the vaccine or immunogenic composition described herein to a mammal. In some forms, the bacteria in the vaccine is an E. coli strain or strains selected from the group consisting of an F18 fimbrial adhesin positive strain, and F4 fimbrial adhesin positive strain, or a combination thereof. In some forms, the mammal is selected from the group of swine and cattle. In some forms, administration of the vaccine or immunogenic composition described herein results in a decrease in the incidence of transference of antimicrobial resistance genes from a live avirulent bacterial vaccine to human pathogens. In some forms, the decrease is at least 10, 20, 30, 40, 50, 60, 70, 80, 85, 90, 95, or even 100% in comparison to a live avirulent vaccine was not cured of AMR genes as described herein. In preferred forms, the bacteria has been cured of at least one AMR gene selected from the group consisting of cm1A1, sul3, sul2, aph(4)-Ia, aac(3)-IV, aph(6)-Id, aadA2b, aph(3″)-Ib, aadA1, mdf(A), mef(B), aadA2b, aph(3′)-Ia, and any combination thereof.

[0012] The present disclosure is also directed to a method of treating, preventing, or reducing the severity, duration, or incidence of clinical signs, of a virulent bacterial infection by vaccination with a live avirulent strain of a bacteria or an immunogenic composition that comprises a live avirulent strain of bacteria, wherein the bacteria is cured of plasmids and/or transposons that contain AMR genes. In preferred forms, the bacteria has been cured of at least one AMR gene selected from the group consisting of cm1A1, sul3, sul2, aph(4)-Ia, aac(3)-IV, aph(6)-Id, aadA2b, aph(3″)-Ib, aadA1, mdf(A), mef(B), aadA2b, aph(3′)-Ia, and any combination thereof.

[0013] The present disclosure is also directed to a method of preventing, or reducing the risk or incidence of, transference of AMR genes from a live avirulent strain of a bacteria or an immunogenic composition that comprises a live avirulent strain of bacteria to human pathogens by administering the live avirulent strain of a bacteria or an immunogenic composition that comprises a live avirulent strain of bacteria as a vaccine to animals, wherein the bacteria has been cured of plasmids and/or transposons that contain AMR genes. In preferred forms, the bacteria has been cured of at least one AMR gene selected from the group consisting of cm1A1, sul3, sul2, aph(4)-Ia, aac(3)-IV, aph(6)-Id, aadA2b, aph(3″)-Ib, aadA1, mdf(A), mef(B), aadA2b, aph(3′)-Ia, and any combination thereof.

### DETAILED DESCRIPTION OF THE DRAWING FIGURES

[0014] FIG. 1 is a listing of sequence ID Nos. 301-672.

### DETAILED DESCRIPTION

[0015] Plasmids with multiple AMR genes considered to be mobile elements were discovered via whole genome sequencing of live avirulent bacterial organisms that are used as vaccines. More specifically, plasmids containing AMR genes were discovered in commercially available live avirulent E. coli vaccines directed to the treatment, prevention, or reduction of severity, duration, or incidence of clinical signs of virulent F18, K88, and in related strains of E. coli, e.g., Escherichia Coli Vaccine, Avirualent Live Culture, Edema Vac, F18 and Escherichia Coli Vaccine, Avirulent Live Culture, Entero Vac, K88 live avirulent E. coli vaccines. The plasmids from these strains of vaccine were analyzed and found to also contain certain incompatibility and addiction elements. Non-conjugative synthetic plasmids containing the same incompatibility and/or addiction elements were designed for the purpose of displacing the AMR-containing natural plasmids through transformation. Methods of curing bacterial cells of plasmids are known in the art, for example, in U.S. Pat. No. 8,877,502, which is incorporated herein by reference in its entirety. In certain aspects, the non-conjugative, synthetic plasmids contain the same incompatibility and addiction elements as the AMR-containing natural plasmids. The synthetic plasmids also contained a positive and negative selection component for the purposes of curing the synthetic plasmid from the E. coli vaccines following displacement of the naturally occurring AMR-containing plasmids. Because the non-conjugative, synthetic plasmid contains the same incompatibility factor as is present in the AMR plasmid, introduction the non-conjugative plasmid into an AMR-containing cell, causes displacement of the existing AMR-containing plasmid. Further, pairing of the anti-toxin encoded by the non-conjugative, synthetic plasmid to the toxin/anti-toxin complex present on the existing AMR ensures survival of the cell containing the non-conjugative, synthetic plasmid following elimination of the AMR-containing plasmid.

[0016] Avirulent E. coli vaccine strains previously found in nature and used as licensed vaccines, e.g., Edema Vac F18 and Entero Vac K88 (both ARKO Laboratories, Jewell, IA), produced for administration to swine were propagated and made competent. The E. coli vaccine strains were then transformed with curing plasmids specific to each strain of vaccine via heat shock to allow transformation of the curing plasmids through open calcium channels in the vaccine cells. Transformed colonies were selected and later propagated with negative selection to produce live avirulent strains of E. coli that have been cured of both naturally occurring plasmids containing AMR genes and the specific curing plasmid. The phenotypic characteristics of the vaccines also changed, especially with respect to the loss of AMR resistance associated with AMR genes that were contained in plasmids that were cured from the E. coli vaccine cells. The displacement of the naturally occurring plasmids containing AMR genes and the specific curing plasmid was confirmed by whole genome sequencing.

[0017] Avirulent E. coli vaccine strains cured of plasmids and/or transposons that contain AMR genes (e.g., Edema Vac F18-SR and Entero Vac K88-SR produced as disclosed herein) were used to vaccinate swine for the effective prevention, reduction in severity, duration, and/or incidence of infection from a respective F18 or K88 strain of virulent E. coli challenge bacteria.

[0018] Advantageously, the methods used for production of live avirulent E. coli vaccines and immunogenic compositions that comprises a live avirulent strain of bacteria, wherein the bacteria has been cured of plasmids and/or transposons that contain AMR genes, and their use as vaccines, can be applied to the production, and use, of other live avirulent bacterial vaccines and immunogenic compositions that comprise live avirulent bacteria.

[0019] In some embodiments, the live avirulent strain of bacteria is a either a Gram-positive or Gram-negative bacteria, or a mycoplasma bacteria. In some embodiments, the live avirulent strain of bacteria is a Gram-negative bacteria. In some embodiments, the live avirulent strain of bacteria is a Gram-negative enteric bacteria. In some embodiments, the live avirulent strain of bacteria is a mycoplasma bacteria. In some embodiments, the live avirulent bacteria is a strain of E. coli. In some embodiments, the live avirulent bacteria is a strain of E. coli that expresses F18 fimbrial adhesin. In some embodiments, the live avirulent bacteria is an F18 strain of E. coli that expresses F18 fimbrial adhesin. In some embodiments, the live avirulent bacteria is a strain of E. coli that expresses F4 fimbrial adhesin. In some embodiments, the live avirulent bacteria is a K88 strain of E. coli that expresses F4 fimbrial adhesin. In some embodiments, the live avirulent bacteria is Edema Vac F18 vaccine that has been cured of plasmids and/or transposons that contain AMR genes. In some embodiments, the live avirulent bacteria is Entero Vac K88 vaccine that has been cured of plasmids and/or transposons that contain AMR genes. In preferred forms, the bacteria has been cured of at least one AMR gene selected from the group consisting of cm1A1, sul3, sul2, aph(4)-Ia, aac(3)-IV, aph(6)-Id, aadA2b, aph(3″)-Ib, aadA1, mdf(A), mef(B), aadA2b, aph(3′)-Ia, and any combination thereof.

[0020] In some embodiments, the synthetic curing plasmid contains incompatibility features. In some embodiments, the synthetic curing plasmid contains incompatibility features that are different from incompatibility features in the naturally occurring plasmids to be cured from the bacteria. In some embodiments, the synthetic curing plasmid contains incompatibility features that are the same as incompatibility features in the naturally occurring plasmids to be cured from the bacteria. In some embodiments, the synthetic curing plasmid contains incompatibility features that are the same as incompatibility features present in plasmids that naturally occur in Gram-negative bacteria. In some embodiments, the synthetic curing plasmid contains incompatibility features that are the same as incompatibility features present in plasmids that naturally occur in E. coli. In some embodiments, the synthetic curing plasmid contains incompatibility features that are the same as incompatibility features that are present in plasmids in either F18 and/or K88 strains of E. coli. In some embodiments, the synthetic curing plasmid contains incompatibility features that are the same as incompatibility features that are present in plasmids in the Edema Vac F18 and/or the Entero Vac K88 vaccine.

[0021] Incompatibility features on the synthetic curing plasmid can include but are not limited to, e.g., the same replicon and/or the same partitioning system as that used by the naturally occurring plasmids to be cured from the bacteria, features that cause a high copy number of the synthetic curing plasmid in relation to the naturally occurring plasmids, iterons that cause downregulation of replication of the naturally occurring plasmids, factors that cause late replication of the naturally occurring plasmids resulting in improper partitioning, and the like.

[0022] In some embodiments, the synthetic curing plasmid contains addiction elements. In some embodiments, the synthetic curing plasmid contains addiction elements that are the different from addiction elements in the naturally occurring plasmids to be cured from the bacteria. In some embodiments, the synthetic curing plasmid contains addiction elements that are the same as addiction elements in the naturally occurring plasmids to be cured from the bacteria. In some embodiments, the synthetic curing plasmid contains addiction elements that are the same as addiction elements present in plasmids that naturally occur in Gram-negative bacteria. In some embodiments, the synthetic curing plasmid contains addiction elements that are the same as addiction elements present in plasmids that naturally occur in E. coli. In some embodiments, the synthetic curing plasmid contains addiction elements that are the same as addiction elements that are present in plasmids in either F18 and/or K88 strains of E. coli. In some embodiments, the synthetic curing plasmid contains addiction elements that are the same as addiction elements that are present in plasmids in the Edema Vac F18 and/or the Entero Vac K88 vaccine.

[0023] Addiction elements on the synthetic curing plasmid can include but are not limited to, e.g., protein-based toxin-antitoxin systems, restriction modification systems, antisense RNA-regulated systems, and the like.

[0024] In some embodiments, the synthetic curing plasmid contains at least one positive and/or negative selection component. In some embodiments, the synthetic curing plasmid contains at least one positive selection component that allows for the selection of bacteria that host the synthetic plasmid that contains the positive selection gene. Examples of positive selection components are antibiotic resistance genes including, but not limited to genes that confer resistance to sodium chlorite, chloramphenicol, tetracycline, neomycin, sulfathiazine, sulfatrim, gentamicin, penicillin, ampicillin, trimethoprim, ciprofloxacin, ceftiofur, clindamycin, danofloxacin, enrofloxacin, florfenicol, Gamithromycin, sulfadimethoxine, spectinomycin, tiamulin, tildipirosin, tilmicosin, Sulphamethoxazole, tulathromycin, and tylosin. In some embodiments, the synthetic curing plasmid contains at least one positive selection component that allows for the selection of bacteria that host the synthetic plasmid that contains the positive selection gene, wherein the positive selection component is different than any positive selection component on the naturally occurring plasmids that are being cured from the bacteria.

[0025] In some embodiments, the synthetic curing plasmid contains at least one negative selection component that allows for the selection of bacteria that are not hosting the synthetic plasmid that contains the negative selection gene. Examples of negative selection components include, but are not limited to, toxin-antitoxin systems and SacB counter-selection. Using SacB counter-selection, plating on sucrose medium will select for cells that no longer contain the SacB gene that codes for the enzyme levansucrase, which converts sucrose to a toxic metabolite in Gram-negative bacteria.

[0026] In some embodiments, the method of producing a live avirulent strain of bacteria or an immunogenic composition that comprises a live avirulent strain of bacteria, wherein the bacteria is cured of plasmids and/or transposons that contain AMR genes is conducted using methods involving transformation and selection of bacteria. In some embodiments, transformation is conducted using methods including, but not limited to, heat shock or electroporation. In some embodiments, selection is conducted using positive selection methods including, but not limited to, antibiotic resistance or auxotrophy. In some embodiments, selection is conducted using negative selection methods including, but not limited to, toxin-antitoxin systems or SacB counter-selection. In preferred forms, the bacteria has been cured of at least one AMR gene selected from the group consisting of cm1A1, sul3, sul2, aph(4)-Ia, aac(3)-IV, aph(6)-Id, aadA2b, aph(3″)-Ib, aadA1, mdf(A), mef(B), aadA2b, aph(3′)-Ia, and any combination thereof.

[0027] As used herein, the term “avirulent bacteria” refers to bacteria that do not cause pathological conditions in an animal when administered to the animal in the amount necessary to elicit the desired immunological response.

[0028] An “immunogenic composition” or “vaccine”, in the context of the present disclosure, refers to a composition of matter that comprises at least one live avirulent bacteria, wherein the bacteria is cured of plasmids and/or transposons that contain AMR genes, that elicits and/or enhances an immunological response in the host of a cellular and/or antibody-mediated immune response to the composition or vaccine of interest. Usually, an “immunological response” includes but is not limited to one or more of the following effects: the production or activation of antibodies, B cells, helper T cells, suppressor T cells, and/or cytotoxic T cells and/or γδ T cells, directed specifically to an antigen or antigens included in the composition or vaccine of interest. Preferably, the host will display either a therapeutic or protective immunological response such that resistance to new infection will be enhanced and/or the clinical severity of the disease reduced. Such protection will be demonstrated by either a reduction in the severity or prevalence of, up to and including a lack of symptoms normally displayed by an infected host, a quicker recovery time and/or a lowered virulent bacterial titer in the infected host.

[0029] “Adjuvants” as used herein, can include incomplete Freunds adjuvant (IFA), aluminum-based adjuvants including aluminum hydroxide and aluminum phosphate, Montanide ISA 720, saponins e.g., Quil A, QS-21 (Cambridge Biotech Inc., Cambridge MA), GPI-0100 (Galenica Pharmaceuticals, Inc., Birmingham, AL), water-in-oil emulsion, oil-in-water emulsion, water-in-oil-in-water emulsion. The emulsion can be based in particular on light liquid paraffin oil (European Pharmacopea type); isoprenoid oil such as squalane or squalene oil resulting from the oligomerization of alkenes, in particular of isobutene or decene: esters of acids or of alcohols containing a linear alkyl group, more particularly plant oils, ethyl oleate, propylene glycol di-(caprylate/caprate), glyceryl tri-(caprylate/caprate) or propylene glycol dioleate: esters of branched fatty acids or alcohols, in particular isostearic acid esters. The oil can be used in combination with emulsifiers to form an emulsion. The emulsifiers are preferably nonionic surfactants, in particular esters of sorbitan, of mannide (e.g. anhydromannitol oleate), of glycol, of polyglycerol, of propylene glycol and of oleic, isostearic, ricinoleic or hydroxystearic acid, which are optionally ethoxylated, and polyoxypropylene-polyoxyethylene copolymer blocks, in particular the Pluronic products, especially L121. See Hunter et al., The Theory and Practical Application of Adjuvants (Ed. Stewart-Tull, D. E. S.). John Wiley and Sons, NY, pp51-94 (1995) and Todd et al., Vaccine 15:564-570 (1997). In certain aspects, the adjuvant may be a mucosal adjuvant, such as Seppic IM 1313 VGNST, Seppic Gel 01 PR, or Chitosan.

[0030] For example, it is possible to use the SPT emulsion described on page 147 of “Vaccine Design, The Subunit and Adjuvant Approach” edited by M. Powell and M. Newman, Plenum Press, 1995, and the emulsion MF59 described on page 183 of this same book.

[0031] A further instance of an adjuvant is a compound chosen from the polymers of acrylic or methacrylic acid and the copolymers of maleic anhydride and alkenyl derivative. Advantageous adjuvant compounds are the polymers of acrylic or methacrylic acid which are cross-linked, especially with polyalkenyl ethers of sugars or polyalcohols. These compounds are known by the term carbomer (Phameuropa Vol. 8, No. 2, June 1996). Persons skilled in the art can also refer to U.S. Pat. No. 2,909,462 which describes such acrylic polymers cross-linked with a polyhydroxylated compound having at least 3 hydroxyl groups, preferably not more than 8, the hydrogen atoms of at least three hydroxyls being replaced by unsaturated aliphatic radicals having at least 2 carbon atoms. The preferred radicals are those containing from 2 to 4 carbon atoms, e.g., vinyls, allyls and other ethylenically unsaturated groups. The unsaturated radicals may themselves contain other substituents, such as methyl. The products sold under the name Carbopol: (BF Goodrich, Ohio, USA) are particularly appropriate. They are cross-linked with an allyl sucrose or with allyl pentaerythritol. Among then, there may be mentioned Carbopol 974P, 934P and 971P. Among the copolymers of maleic anhydride and alkenyl derivative, the copolymers EMA (Monsanto) which are copolymers of maleic anhydride and ethylene. The dissolution of these polymers in water leads to an acid solution that will be neutralized, preferably to physiological pH, in order to give the adjuvant solution into which the immunogenic, immunological or vaccine composition itself will be incorporated.

[0032] Further suitable adjuvants include, but are not limited to, the RIBI adjuvant system (Ribi Inc.), Block co-polymer (CytRx, Atlanta GA), SAF-M (Chiron, Emeryville CA), monophosphoryl lipid A, Avridine lipid-amine adjuvant, heat-labile enterotoxin from E. coli (recombinant or otherwise), cholera toxin, IMS 1314 or muramyl dipeptide among many others.

[0033] Preferably, the adjuvant is added in an amount of about 10 μg to about 10 mg per dose. Even more preferably, the adjuvant is added in an amount of about 100 μg to about 10 mg per dose. Even more preferably, the adjuvant is added in an amount of about 500 μg to about 5 mg per dose. Even more preferably, the adjuvant is added in an amount of about 750 μg to about 2.5 mg per dose. Most preferably, the adjuvant is added in an amount of about 1 mg per dose.

[0034] Additionally, the vaccine can include one or more pharmaceutical-acceptable or veterinary-acceptable carriers. As used herein, “a pharmaceutical-acceptable carrier” or “veterinary-acceptable carrier” includes any and all solvents, solutions, dispersion media, coatings, stabilizing agents, diluents, preservatives, antibacterial, antiviral and antifungal agents, isotonic agents, adsorption delaying agents, and the like. Exemplary carriers include liquid carriers (such as water, saline, calcium chloride, culture medium, aqueous dextrose, and glycols) and solid carriers (such as carbohydrates exemplified by starch, glucose, lactose, sucrose, and dextrans, anti-oxidants exemplified by ascorbic acid and glutathione, and hydrolyzed proteins).

[0035] In some embodiments, the vaccine of the present disclosure can also comprise the addition of any stabilizing agent, such as for example saccharides, trehalose, mannitol, saccharose, skim milk and the like, to increase and/or maintain product shelf-life and/or to enhance stability.

[0036] In some embodiments, the immunological or vaccine composition induces a competitive exclusion effect in the animal receiving the administration thereof. This competitive exclusion effect also results in a decrease in the severity, duration, and/or incidence of clinical signs of E. coli infection.

[0037] In some embodiments, the vaccine is first dehydrated. If the composition is first lyophilized or dehydrated, then, prior to vaccination, said composition is rehydrated in aqueous (e.g., saline, PBS (phosphate buffered saline), calcium chloride solution) or non-aqueous solutions (e.g., oil emulsion (mineral oil, or vegetable/metabolizable oil based/single or double emulsion based), aluminum-based adjuvant, carbomer based adjuvant). Non-chlorinated water is especially preferred for reconstitution or rehydration of the vaccine.

[0038] In various embodiments, the unit dose or dose size of virus included in a given unit dosage form of vaccine can vary widely, and can depend upon factors such as the age, weight and physical condition of the animal considered for vaccination. Such factors can be readily determined by the clinician or veterinarian employing animal models or other test systems which are well known to the art.

[0039] In some embodiments, the vaccine or immunogenic composition of the present disclosure can be administered to an animal in need thereof by any conventional method including, but not limited to, enteral routes of administration (e.g., sublingual, buccal, rectal, and oral routes, including by oral syringe, by gavage, by mixing the vaccine into food or water for consumption), and intranasal routes of administration (e.g., using sprays, pumps, aerosols, and atomizers).

[0040] In some embodiments, an effective amount of a vaccine administered to animals provides effective immunity against microbiological infections or a decreased incidence of or severity of clinical signs caused by virulent bacteria and bacterial infections. In some embodiments, the vaccine is administered to susceptible animals, preferably swine or cattle, in one or more doses. In some embodiments, the vaccine may be administered 1 or 2 times at about 1 to about 3 week intervals. In some embodiments a single dose is preferred. Preferably, the first or single administration is performed around 17-18 days of age or older. In other forms, the vaccine or immunogenic composition is administered at weaning or when the animal is about 1 to about 4 weeks of age, assuming a 21 day or older weaning age. If a second administration is desirable or necessary, the second administration is preferably performed about 1 to about 3 weeks after the first administration of the vaccine. In some embodiments, revaccination is performed in an interval of about 1 to about 2 months after administration of any previous vaccination. In some embodiments, administration of subsequent vaccine doses is preferably done on about a 2 month to about an 3 month basis. In another embodiment, animals vaccinated before the age of about 2 to about 6 weeks should be revaccinated. In some embodiments, administration of subsequent vaccine doses is preferably done on about an annual basis.

[0041] In some embodiments, the amount of vaccine that is effective depends on the ingredients of the vaccine and the schedule of administration. Typically, an amount of the vaccine contains about 1×10³ to about 1×10⁹ plaque forming units (PFU) per dose. In certain aspects, a dose of vaccine contains about 1×10⁴ to about 1×10⁸ PFU. In certain aspects, a dose of vaccine contains about 1×10⁵ to about 1×10⁷ PFU. In certain aspects, a vaccine may contain at least 1×10⁴ PFU, at least 1×10⁵ PFU, at least 1×10⁶ PFU, at least 1×10⁷ PFU, at least 1×10⁸ PFU, or at least 1×10⁹ PFU per dose.

[0042] “Sequence Identity” as it is known in the art refers to a relationship between two or more polypeptide sequences or two or more polynucleotide sequences, namely a reference sequence and a given sequence to be compared with the reference sequence. Sequence identity is determined by comparing the given sequence to the reference sequence after the sequences have been optimally aligned to produce the highest degree of sequence similarity, as determined by the match between strings of such sequences. Upon such alignment, sequence identity is ascertained on a position-by-position basis, e.g., the sequences are “identical” at a particular position if at that position, the nucleotides or amino acid residues are identical. The total number of such position identities is then divided by the total number of nucleotides or residues in the reference sequence to give % sequence identity.

[0043] Sequence identity can be readily calculated by known methods, including but not limited to, those described in Computational Molecular Biology, Lesk, A. N., ed., Oxford University Press, New York (1988), Biocomputing: Informatics and Genome Projects, Smith, D. W., ed., Academic Press, New York (1993): Computer Analysis of Sequence Data, Part I, Griffin, A. M., and Griffin, H. G., eds., Humana Press, New Jersey (1994): Sequence Analysis in Molecular Biology, von Heinge, G., Academic Press (1987): Sequence Analysis Primer, Gribskov, M. and Devereux, J., eds., M. Stockton Press, New York (1991); and Carillo, H., and Lipman, D., SIAM J. Applied Math., 48:1073 (1988), the teachings of which are incorporated herein by reference. Preferred methods to determine the sequence identity are designed to give the largest match between the sequences tested.

[0044] Methods to determine sequence identity are codified in publicly available computer programs which determine sequence identity between given sequences. Examples of such programs include, but are not limited to, the GCG program package (Devereux, J., et al., Nucleic Acids Research, 12 (1): 387 (1984)), BLASTP, BLASTN and FASTA (Altschul, S. F. et al., J. Molec. Biol., 215:403-410 (1990). The BLASTX program is publicly available from NCBI and other sources (BLAST Manual, Altschul, S. et al., NCVI NLM NIH Bethesda, MD 20894, Altschul, S. F. et al., J. Molec. Biol., 215:403-410 (1990), the teachings of which are incorporated herein by reference). These programs optimally align sequences using default gap weights in order to produce the highest level of sequence identity between the given and reference sequences.

[0045] As an illustration, by a polynucleotide having a nucleotide sequence having at least, for example, 85%, preferably 90%, even more preferably 95% “sequence identity” to a reference nucleotide sequence, it is intended that the nucleotide sequence of the given polynucleotide is identical to the reference sequence except that the given polynucleotide sequence may include up to 15, preferably up to 10, even more preferably up to 5 point mutations per each 100 nucleotides of the reference nucleotide sequence. In other words, in a polynucleotide having a nucleotide sequence having at least 85%, preferably 90%, even more preferably 95% identity relative to the reference nucleotide sequence, up to 15%, preferably 10%, even more preferably 5% of the nucleotides in the reference sequence may be deleted or substituted with another nucleotide, or a number of nucleotides up to 15%, preferably 10%, even more preferably 5% of the total nucleotides in the reference sequence may be inserted into the reference sequence. These mutations of the reference sequence may occur at the 5′ or 3′ terminal positions of the reference nucleotide sequence or anywhere between those terminal positions, interspersed either individually among nucleotides in the reference sequence or in one or more contiguous groups within the reference sequence.

[0046] Analogously, by a polypeptide having a given amino acid sequence having at least, for example, 85%, preferably 90%, even more preferably 95% sequence identity to a reference amino acid sequence, it is intended that the given amino acid sequence of the polypeptide is identical to the reference sequence except that the given polypeptide sequence may include up to 15, preferably up to 10, even more preferably up to 5 amino acid alterations per each 100 amino acids of the reference amino acid sequence. In other words, to obtain a given polypeptide sequence having at least 85%, preferably 90%, even more preferably 95% sequence identity with a reference amino acid sequence, up to 15%, preferably up to 10%, even more preferably up to 5% of the amino acid residues in the reference sequence may be deleted or substituted with another amino acid, or a number of amino acids up to 15%, preferably up to 10%, even more preferably up to 5% of the total number of amino acid residues in the reference sequence may be inserted into the reference sequence. These alterations of the reference sequence may occur at the amino or the carboxy terminal positions of the reference amino acid sequence or anywhere between those terminal positions, interspersed either individually among residues in the reference sequence or in the one or more contiguous groups within the reference sequence. Preferably, residue positions which are not identical differ by conservative amino acid substitutions. However, conservative substitutions are not included as a match when determining sequence identity.

[0047] “Sequence homology”, as used herein, refers to a method of determining the relatedness of two sequences. To determine sequence homology, two or more sequences are optimally aligned, and gaps are introduced if necessary. However, in contrast to “sequence identity”, conservative amino acid substitutions are counted as a match when determining sequence homology. In other words, to obtain a polypeptide or polynucleotide having 95% sequence homology with a reference sequence, 85%, preferably 90%, even more preferably 95% of the amino acid residues or nucleotides in the reference sequence must match or comprise a conservative substitution with another amino acid or nucleotide, or a number of amino acids or nucleotides up to 15%, preferably up to 10%, even more preferably up to 5% of the total amino acid residues or nucleotides, not including conservative substitutions, in the reference sequence may be inserted into the reference sequence. Preferably the homologous sequence comprises at least a stretch of 50, even more preferably 100, even more preferably 250, even more preferably 500 nucleotides.

[0048] A “conservative substitution” refers to the substitution of an amino acid residue or nucleotide with another amino acid residue or nucleotide having similar characteristics or properties including size, hydrophobicity, etc., such that the overall functionality does not change significantly.

[0049] Those of skill in the art will understand that the compositions herein may incorporate known physiologically acceptable, sterile solutions. For preparing a ready-to-use solution for administration, aqueous isotonic solutions, such as e.g., saline or corresponding solutions are readily available. In addition, the immunogenic and vaccine compositions of the present disclosure can include diluents, isotonic agents, stabilizers, or adjuvants. Diluents can include water, saline, dextrose, ethanol, glycerol, and the like. Isotonic agents can include calcium chloride, sodium chloride, dextrose, mannitol, sorbitol, and lactose, among others. Stabilizers include albumin and alkali salts of ethylendiamintetracetic acid, among others. Suitable adjuvants are those described above.

[0050] According to a further aspect, the vaccine or immunogenic composition of the present disclosure may further comprise a pharmaceutical acceptable salt, preferably a phosphate salt in physiologically acceptable concentrations. Preferably, the pH of said immunogenic composition is adjusted to a physiological pH, meaning between about 6.5 and 7.5.

[0051] The immunogenic compositions described herein can further include one or more other immunomodulatory agents such as, e. g., interleukins, interferons, or other cytokines. In some embodiments, the vaccine or immunogenic composition can also include antibiotics, wherein the antibiotics are limited to those antibiotics for which the live avirulent bacteria contains a gene within its chromosome that confers AMR specific to the included antibiotics.

[0052] In some embodiments, the composition is administered with an adjuvant, as described above.

[0053] In some embodiments, the composition includes and/or is administered with a veterinary-acceptable carrier, as described above.

[0054] In some embodiments, the composition includes and/or is administered with a stabilizer, as described above.

[0055] In some embodiments, the composition includes and/or is administered with a pharmaceutical acceptable salt, as described above.

[0056] In some embodiments, the composition includes and/or is administered with at least one immunomodulatory agent, as described above.

[0057] Their administration modes, dosages and optimum pharmaceutical forms can be determined according to the criteria generally taken into account in the establishment of a treatment adapted to an animal such as, for example, the age or the weight, the seriousness of its general condition, the tolerance to the treatment and the secondary effects noted. Preferably, the vaccine of the present disclosure is administered in an amount that is protective or provides a protective effect against a virulent bacteria, or related strains, that the vaccine was designed to illicit an immune response against.

### DETAILED DESCRIPTION OF THE DISCLOSURE

[0058] This written description uses examples to describe the disclosure, including the best mode, and also to enable any person skilled in the art to practice the disclosure, including making and using any devices or systems and performing any incorporated methods. The patentable scope of the disclosure is defined by the claims, and may include other examples that occur to those skilled in the art. Such other examples are intended to be within the scope of the claims if they have structural elements that do not differ from the literal language of the claims, or if they include equivalent structural elements with insubstantial differences from the literal languages of the claims.

[0059] The following examples are provided in order to demonstrate and further illustrate certain preferred embodiments and aspects of the present invention and are not to be construed as limiting the scope thereof.

### Example 1: Materials and Methods

[0060] Edema Vac® F18 (Edema Vac F18) and Entero Vac® K88 (Entero Vac K88) live avirulent E. coli vaccines (ARKO Laboratories) Max Efficiency™ DH5α E. coli (DH5α E. coli) Competent Cells (sourced from Thermo Fisher (Invitrogen) #18258012), including pUC19 DNA (0.01 μg/ml) and S.O.C. medium: 2% tryptone, 0.5% yeast extract, 10 mM NaCl, 2.5 mM KCl, 10 mM MgCl₂, 10 mM MgSO₄, and 20 mM glucose.

[0061] Curing plasmid (with chloramphenicol and sodium chlorite resistance genes) for curing Edema Vac F18 live avirulent E. coli cell vaccine (Source—Chris Thomas, University of Birmingham, UK, SEQ ID NO: 15).

[0062] Curing plasmid (with chloramphenicol and sodium chlorite resistance genes) for curing Entero Vac K88 live avirulent E. coli cell vaccine (Source—Chris Thomas, University of Birmingham, UK: SEQ ID NO: 16).

[0063] F18 and K88 E. coli reference strains (South Dakota State University) (SEQ ID NOS., 13 and 14, respectively).

[0064] Illumina sequencing performed using by Genewiz.

[0065] Pigs used for initial F18 study (E. coli susceptible pigs).

[0066] Pigs used for F18/K88 study (15 day old pigs from AMVC, LLC, porcine reproductive and respiratory syndrome/Flu negative).

[0067] Reference control strains for F18 E. coli (F18 Reference) and K88 E. coli (K88 Reference) (South Dakota State University (SDSU).

[0068] F18 monoclonal antibody (RTI, Brookings, South Dakota).

[0069] Goat anti-mouse FITC conjugate (MP Biomedicals, Irvine, CA).

[0070] Tetracycline (TE 30), Neomycin (NE 30), Sulfathiazine (ST 0.25), Sulfatrim (SXT), and Gentamicin (GM 10) discs.

[0071] Liofilchem™ MTS™ Trimethoprim[TM] 0.002-32 μg/mL-MIC test strips (sourced from Fisher Scientific #22-777-761).

[0072] Sodium Chlorite (Sigmaaldrich.com, Cat. #244155-5G).

[0073] Chloramphenicol.

[0074] Ampicillin.

[0075] Ciprofloxacin (Alfa Aesar, Thermo Scientific).

[0076] Tetracycline HCL.

[0077] Sucrose.

[0078] Glycerol.

[0079] E. coli production media.

[0080] F18 production media.

[0081] Tris EDTA buffer (TE buffer).

[0082] TSB media (Tryptone, Soy, NaCl, dipotassium phosphate (K₂HPO₄), and glucose.

[0083] F18 Production Media.

[0084] 1× LB agar media (Teknova, Cat. #L9105): 1% Tryptone, 0.5% Yeast Extract, 1% Sodium Chloride, 1.5% Agar. Dissolved 40 grams per liter of water, Autoclaved to sterilize.

[0085] LB (Miller) broth (Gibco), LB (Miller) broth (Difco), LB broth (Teknova), LB Agar media (Teknova, Cat. #L9105), LB agar containing blood, LB agar containing 25 μg/ml chloramphenicol (Teknova), LB agar containing 100 μg/ml ampicillin, 5% BBA (Brucella Blood Agar) containing 5 μg/ml ciprofloxacin, Blood Agar media, Tryptose Blood Agar Base (Difco, Ref #223220), Donor Bovine Blood/Defibrinated (Quad Five, Prod. #910-500).

[0086] Mueller Hinton agar plates.

[0087] PureLink™ HiPure Plasmid Maxiprep Kit (Plasmid Maxiprep Kit) (Invitrogen, Cat. #K210006).

[0088] Fimbrex K88 agglutination test (Veterinary Laboratories Agency).

[0089] DI Water, sterile R/O water, Ultrapure water.

### Example 2: Determination of Minimum Inhibitory Concentration (MIC) for Sodium Chlorite for Entero Vac F18 and Edema Vac K88 Vaccine Strains

[0090] Testing for resistance of the live avirulent E. coli strains, Entero Vac K88 and Edema Vac F18, to sodium chlorite was performed by evaluating the minimum inhibitory concentration of sodium chlorite as follows: Serial dilutions of sodium chlorite were prepared from a 100 mM stock solution using sterile TSB media and filter sterilized through 0.22 μm filter. Serially diluted tubes (5 ml each) were inoculated with either Entero Vac K88 or Edema Vac F18 strains of E. coli vaccine by adding 20 μl of 100 dose size of either Entero Vac K88 or Edema Vac F18 vaccine rehydrated in 5 ml TSB media. Positive controls are inoculated TSB media only, negative controls are uninoculated TSB media. All tubes were incubated overnight at 37° C. and turbidity was visualized the following day. Results of the MIC tests are disclosed in Table 1.

TABLE 1

| | | |
|---|---|---|
| NaClO₂ | Edema F18 | Entero K88 |
| Conc. | AMR5 | AMR36 |

| | | | |
|---|---|---|---|
| 10 | mM | Neg | Neg |
| 1 | mM | Neg | Neg |
| 0.5 | mM | Neg | Neg |
| 0.25 | mM | Neg | Neg |
| 0.125 | mM | Neg | Neg |
| 0.0625 | mM | Pos | Pos |
| 0.03125 | mM | Pos | Pos |

| | | |
|---|---|---|
| 0 - Pos Control | Pos | Pos |
| Neg Control | Neg | Neg |

### Example 3: Transformation of DH5a E. coli with AMR5 Plasmid (SEQ ID NO. 17) for Propagation and Amplification

[0091] AMR5 plasmids (SEQ ID NO. 17) were reconstituted from a nitrocellulose filter disc in 0.1× TE buffer in RNAse and DNAse free tubes to about 8.5 ng/ml. About 35 ng of AMR5 plasmid DNA (SEQ ID NO. 17) was added to 100 μl of stock DH5a E. coli cells. Transformation was performed by cooling the cells on ice for 30 min, heat shocking at 42° C. for 45 sec, cooling on ice for 2 min, adding 0.9 ml S.O.C. media at room temperature, and incubating for 1 hour at 37° C. on an orbital shaker. Samples were plated using 0.1 ml of serial dilutions of sample (1:10, 1:100, and 1:1,000) on LB agar containing 25 μg/ml chloramphenicol, incubated at 37° C. for 1-2 days, individual colonies picked and streaked on LB agar containing 25 μg/ml chloramphenicol, incubated at 37° C. for 1-2 days, individual colonies picked and sub-cultured in 25 ml LB broth containing 25 μg/ml chloramphenicol, and incubated at 37° C. on orbital shaker at 125 rpm (DH5a AMR5 seeds were prepared by mixing 3.75 ml overnight culture to 1.25 ml sterile glycerol, aliquoted and frozen at −70° C.). Transfer of DH5a AMR5 broth culture to 500 ml of LB broth containing 25 μg/ml chloramphenicol was performed with sterile swab, incubated at 37° C. overnight with magnetic stirrer, pelleted at 4,000×g for 10 min, and resuspended in 200 μl TE buffer (not mentioned here, but is included when processing ARKO2B).

[0092] AMR5 plasmid DNA was isolated from DH5a AMR5 cells using a Plasmid Maxiprep Kit.

[0093] Positive controls for transformation were performed using DH5α E. coli cells, about 50 pg of pUC19 plasmid DNA, and plating on LB agar containing 100 μg/ml ampicillin.

### Example 4: Transformation of DH5a E. coli with ARKO2B Plasmid (SEQ ID NO. 18) for Propagation and Amplification

[0094] ARKO2B plasmids (SEQ ID NO. 16) were reconstituted from a nitrocellulose filter disc in 0.1× TE buffer in RNAse and DNAse free tubes to about 8.5 ng/ml. About 35 ng (10 μl) of ARKO2B plasmid DNA (SEQ ID NO. 16) was added to 100 μl of stock DH5a E. coli cells. Transformation was performed by cooling the cells on ice for 30 min, heat shocking at 42° C. for 45 sec, cooling on ice for 2 min, adding 0.9 ml S.O.C. media at room temperature, and incubating for 30 min at 37° C. on an orbital shaker at 225 rpm. Samples were plated using 0.1 ml of serial dilutions of sample (1:10, 1:100, and 1:1,000) on LB agar containing 25 μg/ml chloramphenicol, incubated at 37° C. for 1-2 days, individual colonies picked and streaked on LB agar containing 25 μg/ml chloramphenicol, incubated at 37° C. for 1-2 days, individual colonies picked and sub-cultured in 3 ml LB broth containing 25 μg/ml chloramphenicol, and incubated at 37° C. overnight on orbital shaker at 125 rpm. (DH5a ARKO2B seeds were prepared by adding sterile glycerol to 10%, aliquoted and frozen at −70° C.). Transferred 1 ml of DH5a ARKO2B broth culture to 25 ml of LB broth containing 25 μg/ml chloramphenicol, and incubated at 37° C. overnight on orbital shaker at 150 rpm. Transferred 10 ml of DH5a ARKO2B broth culture to 600 ml of LB broth containing 25 μg/ml chloramphenicol, incubated at 37° C. overnight on orbital shaker at 150 rpm, pelleted at 4,000×g for 10 min, and resuspended in 200 μl TE buffer.

[0095] ARKO2B plasmid DNA was isolated from DH5a ARKO2B cells using a Plasmid Maxiprep Kit following.

[0096] Positive controls for transformation were performed using DH5α E. coli cells, about 50 pg (5 μl) of pUC19 plasmid DNA, and plating on LB agar containing 100 μg/ml ampicillin.

### Example 5: Preparation of Competent Edema Vac F18 and Entero Vac K88 Cells

[0097] Preparation of Edema Vac F18 subculture was performed by transferring a small amount of Edema Vac F18 vaccine (previously rehydrated in TSB media and frozen) to 25 mL LB (Miller) broth, and incubated at 37° C. on an orbital shaker at 125 rpm overnight. Competent Edema Vac F18 cells (MS112101HM-competent) were prepared by transferring 0.3 ml of the Edema Vac F18 subculture to 25 ml of LB (Miller) broth, incubating at 37° C. on orbital shaker at 125 rpm for 2.25 hours, pelleting at 4500×g at 4° C. in 50 ml centrifuge tube, discarding supernatant, resuspending in 10 ml of 100 mM calcium chloride, re-pelleting at 4500×g at 4° C. in 50 ml centrifuge tube, discarding superatant, resuspending in 2.5 ml solution of 85 mM calcium chloride and 15% glycerol, preparing seeds by aliquoting into cryovials and quick freezing to −70° C. in isopropyl alcohol-dry ice bath, and storing at −70° C. for future use.

[0098] Competent Entero Vac K88 cells (ECMS091703HM-competent) were prepared using the same procedure with the exception of replacing the Edema Vac F18 vaccine with the Entero Vac K88 vaccine.

### Example 6: Transformation of Edema Vac F18 and DHSa E. coli Cells With AMR5 Plasmid (SEQ ID NO. 15)

[0099] Transformation of competent Edema Vac F18 and DH5α E. coli cells with AMR5 plasmid (SEQ ID NO. 15) was performed separately as follows: Adding 10 ul of AMR5 plasmid prep (SEQ ID NO. 15) to 100 ul Edema Vac F18 competent cells (MS112101HM-competent) or DH5a E. coli cells, incubating on ice for 30 min, heat shocking at 42° C. for 45 sec, replacing to ice for 5 min, adding 0.9 ml S.O.C. media, incubate at 37° C. for 4 hours on orbital shaker at 225 rpm, diluting 1:10 in S.O.C. media, and plating 0.1 ml of serial dilutions on either LB agar containing 1 mM sodium chlorite or LB agar containing 25 μg/ml chloramphenicol. Edema Vac F18 (MS112101HM-AMR5) and DH5α E. coli (DH5α-AMR5) samples transformed with AMR5 plasmid (sodium chlorite resistant) were combined with sterile glycerol to 20% sterile glycerol and stored as seeds at −70° C.

[0100] Non-transformed Edema Vac F18 and DH5α E. coli cells and LB agar with no additive were used as controls.

### Example 7: Transformation of Entero Vac K88 and DH5a E. coli Cells with ARKO2B Plasmid (SEQ ID NO. 16)

[0101] Transformation of competent Entero Vac K88 and DH5a E. coli cells with AMR5 plasmid (SEQ ID NO. 16) was performed separately as follows: Adding 10 ul of ARKO2B plasmid (SEQ ID NO. 16) prep to 100 ul Entero Vac K88 competent cells (ECMS091703HM-competent) or DH5a E. coli cells, incubating on ice for 30 min, heat shocking at 42° C. for 45 sec, replacing to ice for 2 min, adding 0.9 ml S.O.C. media, incubate at 37° C. for 1 hour on orbital shaker at 225 rpm, diluting 1:10 in LB broth containing 1 mM sodium chlorite, incubating overnight at 37° C., and plating 0.1 ml of serial dilutions on either LB agar containing 1 mM sodium chlorite or LB agar containing 25 μg/ml chloramphenicol. Entero Vac K88 (ECMS091703HM-ARKO2B) and DH5α E. coli (DH5α-ARKO2B) samples transformed with ARKO2B plasmid (sodium chlorite resistant) were combined with sterile glycerol to 10% sterile glycerol and stored as seeds at −70° C.

[0102] Non-transformed Entero Vac K88 and DH5α E. coli cells and LB agar with no additive were used as controls.

### Example 8: Selection of Edema Vac F18 Cells Cured of Plasmids that Contain AMR Genes

[0103] Selection of Edema Vac F18 cells cured of plasmids that contain AMR genes was performed as follows: thawing, serial diluting, and plating the stored AMR5 transformed Edema Vac F18 cells (MS112101HM-AMR5) on LB agar containing 1 mM sodium chlorite, incubating overnight at 37° C., picking sodium chlorite resistant colonies and tri-streaking on LB agar containing 1 mM sodium chlorite, picking chlorite resistant colonies, inoculating 0.5 ml LB (Miller) broth, transferring 0.1 ml of inoculate to 5 ml of either LB broth or LB broth containing 1 mM sodium chlorite, incubating overnight at 37° C., plating and streaking each on LB agar containing 5% sucrose, incubating overnight at 37° C., picking colonies with growth (MS112101HM-SR), and testing for negative growth in LB broth containing either 25 μg/ml chloramphenicol or 1 mM sodium chlorite versus LB broth without additives. MS112101HM-SR was harvested, mixed with sterile glycerol to 20% glycerol, and stored as seeds at −72° C. The AMR5 plasmid contains the sacB gene, which makes Gram negative organisms, including E. coli, sensitive to sucrose. As such, transformed E. coli that retain the AMR5 plasmid will not grow on media containing 5% sucrose, whereas those cells that lose the plasmid will grow on media containing 5% sucrose.

[0104] Plating on LB agar containing blood was used as positive control for initial plating, non-transformed MS112101HM-competent cells were used as control for comparison to the transformed colonies.

[0105] AMR testing was performed comparing MS112101HM—SR, MS112101HM-AMR5, and MS112101HM-competent cells cultured on Mueller Hinton agar plates using Sulfatrim (SXT), Tetracycline (TE 30), Neomycin (NE 30), Sulfathiazine (ST 0.25), and Gentamicin (GM 10) discs. Results of the AMR testing are presented in Table 2. Notably, the MS112101HM-SR strain displayed less resistance to SXT, NE 30, ST 0.25, and GM 10, whereas the MS112101HM-AMR5 strain retained resistance to NE 30. Also, all strains maintain tetracycline resistance, which is considered to be incorporated in the bacterial genome.

TABLE 2

| | Ring measurement (radius, mm) | | | | |
|---|---|---|---|---|---|
| Mueller Hinton plates | SXT | TE 30 | NE 30 | ST 0.25 | GM 10 |
| MS112101HM-SR | 16 | 0 | 8 | 15 | 11 |
| MS112101HM-AMR5 | 17 | 0 | 11 | 18 | 11 |
| MS112101HM-competent | 11 | 0 | 7 | 0 | 4 |

[0106] A master seed of MS112101HM-SR was produced as follows: subculturing 1 seed of MS112101HM—SR in media 852006041, incubating overnight at 37° C., extracting 220 ml and adding to 24.5 ml glycerol, and storing aliquots at −70° C. (MS060520HM-PCISRAF18).

### Example 9: Selection of Entero Vac K18 Cells Cured of Plasmids that Contain AMR Genes

[0107] Selection of Entero Vac K18 cells cured of plasmids that contain AMR genes was performed as follows: subculturing the ARKO2B transformed Entero Vac K88 cells (ECMS091703HM-ARKO2B) in LB broth containing 1 mM sodium chlorite into 3 ml LB broth without sodium chlorite, incubating overnight at 37° C., streaking and picking sodium chlorite resistant colonies, plating and streaking each on LB agar containing 5% sucrose, incubating overnight at 37° C., picking colonies with growth (ECMS091703HM-SR), and testing for negative growth in LB broth containing 1 mM sodium chlorite versus LB broth without additives. ECMS091703HM-SR was sub-cultured on blood agar, harvested, mixed with sterile glycerol to 20% glycerol, and stored as seeds at −72° C. The ARKO2B plasmid contains the sacB gene, which makes Gram negative organisms, including E. coli, sensitive to sucrose.

[0108] Plating on LB agar containing blood was used as positive control for initial plating, non-transformed ECMS091703HM-competent cells were used as control for comparison to transformed colonies.

[0109] Fimbrex K88 agglutination test was performed on both ECMS091703HM-SR and ECMS091703HM-competent blood agar plates. Strong agglutination reactions were observed for both isolates.

[0110] AMR testing was performed comparing ECMS091703HM-SR and ECMS091703HM-competent cells cultured on Mueller Hinton agar plates using Neomycin (NE 30) and Sulfathiazine (ST 0.25) discs. Results of the AMR testing are presented in Table 3. A master plate of ECMS091703HM-SR was produced as follows: subculturing a colony of ECMS091703HM-SR from LB agar containing 5% sucrose on new LB agar containing 5% sucrose, incubating overnight at 37° C., and storing sealed at 2-8° C. Notably, the ECMS091703HM-SR strain displayed less resistance to NE 30 and ST 0.25.

TABLE 3

Ring
measurement
(radius, mm)

| Mueller Hinton plates | NE 30 | ST 0.25 |
|---|---|---|
| ECMS091703HM-SR | 34 | 20 |
| ECMS091703HM-competent | No ring | 13 |
| | 7 | |

### Example 10: Production Preparation of Edema Vac F18 Cells Cured of Plasmids that Contain AMR Genes

[0111] Edema Vac F18 cells cured of plasmids that contain AMR genes from master seeds (MS060520HM-PCISRAF18) were used for a production procedure as follows: thawing MS060520HM-PCISRAF18 master seed and adding 21.4 ul to 5 ml F18 production media, transferring 0.25 ml of MS060520HM-PCISRAF18 inoculate to 25 ml F18 production media, incubating at 37° C. on orbital shaker for 22 hours at 200 rpm, adding 6 ml glycerol, aliquoting and storing at −70° C. Production seeds were titrated versus Edema Vac F18 cell control production.

### Example 11: Production Preparation of Entero Vac K88 Cells Cured of Plasmids that Contain AMR Genes

[0112] Entero Vac K88 cells cured of plasmids that contain AMR genes from ECMS091703HM-SR colony on LB agar containing 5% sucrose were used for a production procedure as follows: inoculating the ECMS091703HM-SR colony to 60 ml E. coli production media, incubate overnight at 37° C. on orbital shaker at 175 rpm, transferring 60 ml of fermentate to 740 ml of E. coli production media, incubating overnight at 37° C. on orbital shaker at 175 rpm, adding glycerol to 10% concentration, aliquoting and storing at −80° C. (Master seeds of Entero Vac K88 cured of plasmids that contain AMR genes production: MS-K88-030321HM-PC2BSRAK88).

### Example 12: Antibiotic Sensitivity of Edema Vac F18 Cells Cured of Plasmids that Contain AMR Genes

[0113] The antibiotic sensitivity of Edema Vac F18 cells cured of plasmids that contain AMR genes (MS060520HM-PCISRAF18) was performed at Iowa State University (ISU) (Accession: 2020076670) with comparison to MS112101HM-competent cells (see Tables 4 and 5). Results indicate an increase in antibiotic sensitivity for the cured MS060520HM-PCISRAF18 cells over the MS112101HM-competent cells (including loss of antibiotic resistance to at least ampicillin, tetracycline, florfenicol, gentamicin, and sulfadimethoxine; however as shown, the cured MS060520HM-PCISRAF18 cells retained resistance to ampicillin, clindamycin, penicillin, tetracycline, tiamulin, and tilmicosin.

TABLE 4

| | F18 Pre-Cured | F18 Cured |
|---|---|---|
| | cells | vaccine |
| | (MS112101HM- | (MS060520HM- |
| | competent) | PCISRAF18) |
| E. COLH | *Int/MIC | *Int/MIC |
| Ampicillin | R/>16.0000 | R/>16.0000 |
| Ceftiofur | S/0.5000 | S/<=0.2500 |
| Clindamycin | R/>16.0000 | R/>16.0000 |
| Enrofloxacin | S/<=0.1200 | S/<=0.1200 |
| Florfenicol | R/8.0000 | S/2.0000 |
| Gentamicin | R/16.0000 | S/<=1.0000 |
| Neomycin | S/<=4.0000 | S/<=4.0000 |
| Penicillin | R/>8.0000 | R/>8.0000 |
| Sulfadimethoxine | R/>256.0000 | S/<=256.0000 |
| Spectinomycin | NI/>64.0000 | NI/16.0000 |
| Tetracycline | R/>8.0000 | R/>8.0000 |
| Tiamulin | R/32.0000 | R/>32.0000 |
| Tilmicosin | R/>16.0000 | R/>16.0000 |
| Trimethoprim/ | NI/<=2.0000 | NI/<=2.0000 |
| Sulphamethoxazole | | |
| Tylosin | NI/>32.0000 | NI/>32.0000 |
| (Tartrate/Base) | | |
| Danofloxacin | NI/<=0.1200 | NI/<=0.1200 |
| Tulathromycin | NI/<=8.0000 | NI/<=8.0000 |
| Gamithromycin | NI/4.0000 | NI/4.0000 |
| Tildipirosin | NI/4.0000 | NI/4.0000 |
| Positive Control | OK/3413.3333 | OK/3450.3333 |

TABLE 5

| | F18 Cured vaccine |
|---|---|
| | (MS060520HM- |
| | PCISRAF18) |
| E. COS | *Int/MIC |
| Ampicillin | S/4.0000 |
| Ceftiofur | S/0.5000 |
| Clindamycin | R/>16.0000 |
| Enrofloxacin | S/<=0.1200 |
| Florfenicol | I/4.0000 |
| Gentamicin | S/<=1.0000 |
| Neomycin | S/<=4.0000 |
| Penicillin | R/>8.0000 |
| Sulfadimethoxine | S/<=256.0000 |
| Spectinomycin | NI/<=8.0000 |
| Tetracycline | S/1.0000 |
| Tiamulin | R/>32.0000 |
| Tilmicosin | R/>16.0000 |
| Trimethoprim/ | NI/<=2.0000 |
| Sulphamethoxazole | |
| Tylosin | NI/>32.0000 |
| (Tartrate/Base) | |
| Danofloxacin | NI/<=0.1200 |
| Tulathromycin | NI/<=8.0000 |
| Gamithromycin | NI/8.0000 |
| Tildipirosin | NI/8.0000 |
| Positive Control | OK/3493.66 |

[0114] Further evaluation of tetracycline sensitivity of cured MS060520HM-PCISRAF 18 cells was performed as follows: inoculating 10 ml of TSB media with MS060520HM-PCISRAF18 cells, incubating at 37° C. for 22 hours on orbital shaker at 150 rpm, preparing 1:1 serial dilutions of 5 ml tetracycline HCL in TSB media (from stock of 640 mg tetracycline HCl in 5 ml ultrapure water), inoculating the serial dilutions with 10 ul of the fermentate. Results, presented in Table 6 confirm that the MS060520HM-PCISRAF18 cells retain tetracycline resistance and has inhibited growth at 128 μg/ml of tetracycline HCl in TSB media.

TABLE 6

| Tet HCl | Turbidity 8 | Turbidity 24 |
|---|---|---|
| Conc. | hours post | hours post |
| (μg/ml) | inoculation | inoculation |
| 128 | Neg | Pos |
| 64 | Slight | Pos |
| 32 | Pos | Pos |
| 16 | Pos | Pos |
| 8 | Pos | Pos |
| 4 | Pos | Pos |
| 2 | Pos | Pos |
| 0 (control) | Pos | Pos |

[0115] Comparison of tetracycline resistance between Edema Vac F18 cells cured of plasmids that contain AMR genes (MS060520HM-PCISRAF18) and Entero Vac K88 cells cured of plasmids that contain AMR genes (MS-K88-030321HM-PC2BSRAK88) was performed as follows: preparing subcultures of MS060520HM-PCISRAF18 and MS-K88-030321HM-PC2BSRAK88 on blood agar containing 16 μg/ml tetracycline HCl, incubating for 18 hours at 37° C., and observing haemolytic growth. Results confirmed tetracycline resistance for MS060520HM-PCISRAF18, while MS-K88-030321HM-PC2BSRAK88 did not display any tetracycline resistance.

### Example 13: Antibiotic Sensitivity of Entero Vac K88 Cells Cured of Plasmids that Contain AMR Genes

[0116] The antibiotic sensitivity of Entero Vac K88 cells cured of plasmids that contain AMR genes (MS-K88-030321HM-PC2BSRAK88) was performed at Iowa State University (ISU) with comparison to ECMS091703HM-competent cells. Results indicated an increase in antibiotic sensitivity between the competent cells and the cured cells as presented in Table 7. Notably the cured MS-K88-030321HM-PC2BSRAK88 cells were more sensitive to florfenicol, neomycin, sulfadimethoxine, and tetracycline.

TABLE 7

| | | K88 Cured |
|---|---|---|
| | K88 Pre-Cured | vaccine |
| | cells | (MS-K88- |
| | (ECMS091703HM- | 030321HM- |
| | competent) | PC2BSRAK88) |
| E. COS | *Int/MIC | *Int/MIC |
| Ampicillin | S/4.0000 | S/4.0000 |
| Ceftiofur | S/0.5000 | S/0.5000 |
| Clindamycin | R/>16.0000 | R/>16.0000 |
| Danofloxacin | NI/<=0.1200 | NI/<=0.1200 |
| Enrofloxacin | S/<=0.1200 | S/<=0.1200 |
| Florfenicol | R/8.0000 | I/4.0000 |
| Gamithromycin | NI/>8.0000 | NI/8.0000 |
| Gentamicin | S/<=1.0000 | S/<=1.0000 |
| Neomycin | R/16.0000 | S/<=4.0000 |
| Penicillin | R/>8.0000 | R/>8.0000 |
| Sulfadimethoxine | R/>256.0000 | S/<=256.0000 |
| Spectinomycin | NI/>64.0000 | NI/<=8.0000 |
| Tetracycline | R/>8.0000 | S/1.0000 |
| Tiamulin | R/>32.0000 | R/>32.0000 |
| Tildipirosin | NI/8.0000 | NI/8.0000 |
| Tilmicosin | R/>16.0000 | R/>16.0000 |
| Trimethoprim/ | NI/<=2.0000 | NI/<=2.0000 |
| Sulphamethoxazole | | |
| Tulathromycin | NI/32.0000 | NI/<=8.0000 |
| Tylosin | NI/>32.0000 | NI/>32.0000 |
| (Tartrate/Base) | | |
| Positive Control | OK/3462.3333 | OK/3493.66 |

### Example 14: Analysis of Edema Vac F18 Cells Cured of Plasmids that Contain AMR Genes and Entero Vac K88 Cells Cured of Plasmids that Contain AMR Genes

[0117] Agglutination testing was performed on subcultures of Entero Vac K88 competent cells (ECMS091703HM-competent) and production of Entero Vac K88 cells cured of plasmids that contain AMR genes (MS-K88-030321HM-PC2BSRAK88) as follows: ECMS091703HM-competent cells and MS-K88-030321HM-PC2BSRAK88 cured cells were sub-cultured and tri-streaked on blood agar from master seeds of each, incubated overnight at 37° C. Agglutination was confirmed for each sample versus positive and negative control samples.

[0118] Reference control strains for F18 E. coli (F18 Reference: SEQ ID NO. 13) and K88 E. coli (K88 Reference; SEQ ID NO. 14) were each sub-cultured on blood agar, incubated overnight at 37° C., and streaked for isolation. A colony of each was transferred to 15 ml TSB media, incubated overnight at 37° C. on orbital shaker at 175 rpm, added to 1.5 ml glycerol, aliquoted, and stored at −80° C.

[0119] Goat anti-mouse FITC conjugate was reconstituted with 2 ml ultrapure water, diluted to 1:10, aliquoted and stored at either 2-8° C. or at −80° C.

[0120] Results were positive.

### Example 15: Sequencing of Vaccines, Curing Plasmids, and Cured Vaccines

[0121] Sequencing of the genetic composition of the Edema Vac F18 vaccine, the Entero Vac K88 vaccine, the AMR5 plasmid for curing Edema Vac F18 vaccine (SEQ ID NO: 15), the ARKO2B plasmid for curing Entero Vac K88 vaccine (SEQ ID NO: 16), the Edema Vac F18 cells cured of plasmids containing AMR genes from production run (MS060520HM-PCISRAF18) (elaborated by the nodes or contigs of SEQ ID NOS: 17-164), and the Entero Vac K88 cells cured of plasmids containing AMR genes from production run (MS-K88-030321HM-PC2BSRAK88) (elaborated by the contigs or nodes of SEQ ID NOS: 165-672) was performed by Genewiz using Illumina sequencing.

[0122] Virulence factor analysis was performed for the Edema Vac F18 cells cured of plasmids containing AMR genes from production run (MS060520HM-PCISRAF18), and the Entero Vac K88 cells cured of plasmids containing AMR genes from production run (MS-K88-030321HM-PC2BSRAK88). The results showed that one of the virulence genes was removed.

[0123] A sequence search was performed for the Edema Vac F18 cells cured of plasmids containing AMR genes from production run (MS060520HM-PCISRAF18) (elaborated by the contigs or nodes of SEQ ID NOS: 17-164), the Entero Vac K88 cells cured of plasmids containing AMR genes from production run (MS-K88-030321HM-PC2BSRAK88) (elaborated by the contigs or nodes of SEQ ID NOS: 165-672), the AMR5 plasmid for curing Edema Vac F18 vaccine (SEQ ID NO: 15), and the ARKO2B plasmid for curing Entero Vac K88 vaccine (SEQ ID NO: 16). The results showed that AMR genes were eliminated.

The application's sequence listing, which the Patent Office published only in electronic form, follows.

SEQUENCE LISTING (300 sequences)

SEQ ID NO: 1 - DNA, 802 bp, Escherichia coli
  source 1..802: mol_type = genomic DNA
gtgagctcaaaaaactttagttggcggtactcccttgccgccacggtgttgttgttatcaccgttcgatttattggcatcactcggcatggacatgtacttgccagcagttccgtttatgccaaacgcgcttggtacgacagcgagcacaattcagcttacgctgacaacgtacttggtcatgattggtgccggtcagctcttgtttggaccgctatcggaccgactggggcgccgccccgttctactgggaggtggcctcgcctacgttgtggcgtcaatgggcctcgctcttacgtcatcggctgaagtctttctggggcttcggattcttcaggcttgtggtgcctcggcgtgccttgtttccacatttgcaacagtacgtgacatttacgcaggtcgcgaggaaagtaatgtcatttacggcatactcggatccatgctggccatggtcccggcggtaggcccattgctcggagcgctcgtcgacatgtggcttgggtggcgggctatctttgcgtttctaggtttgggcatgatcgctgcatctgcagcagcgtggcgattctggcctgaaacccgggtgcaacgagttgcgggcttgcaatggtcgcagctgctactccccgttaagtgcctgaacttctggttgtacacgttgtgttacgccgctggaatgggtagcttcttcgtctttttctccattgcgcccggactaatgatgggcaggcaaggtgtgtctcagcttggcttcagcctgctgttcgccacagtggcaattgccatggtgtttacggctcgtt

SEQ ID NO: 2 - DNA, 992 bp, Escherichia coli
  source 1..992: mol_type = genomic DNA
aaaaaattaggctgcaaagatagggaaaatgtgtcaatttgcgtaagtgataattagtcaattaagataaatgctacttttgtaatcaaagcaaaatgatatgagcaagatttttggaatcgtaaatataaccaccgatagtttttccgatggaggactttatttagatacagataaggcaattgagcatgctctgcatttggttgaagatggagcagatgtgattgatttgggagccgcttccagtaatcctgatacaactgaagtgggcgttgtggaagaaatcaaaagactcaaacctgtcattaaggctttaaaagaaaaaggcatttctatttctgttgatacatttaaacctgaggttcagagtttttgcatagaacaaaaggttgattttattaatgatattcaaggttttccttatcctgagatttattcaggcttggcaaagtcagattgcaaacttgtgttgatgcactccgttcagcgaattggtgcagctactaaagttgaaacgaatccggaagaggtttttacttccatgatggaattttttaaagaaagaattgctgctttagttgaggctggtgtaaagcgtgaacgaattattcttgatccgggtatgggcttctttttaggctctaatccagaaacatctattcttgttttgaagcgtttccctgaaattcaagaagcttttaatttgcaagtaatgattgcagtgtcacggaaatcattcttaggtaaaataactggaaccgatgtgaaatctcgtttagcaccaactcttgcagcagaaatgtatgcatacaaaaaaggtgcagattatctccgcacccatgatgttaagtctttatcagatgccttgaaaatatccaaagccctaggttagttttatttttttagctttctaaatgaatatgctatacttgctctgaagttgtgttggcgtacttgacttaggtctggatctttcgaactgttactaagag

SEQ ID NO: 3 - DNA, 816 bp, Escherichia coli
  source 1..816: mol_type = genomic DNA
ttaacgaattcttgcggtttctttcagcgccgccaataccgccagcccgtcgcgcaaggggcgcggctcgtgtgtgcggatgaagtcagctccacctgcggcggcggcaagctctgcagcgagtgtcgcggccccgacatcccccggaccacggcctgtgagcgcgcgcagaaaggatttgcgcgaaacagacagaagcaccggcaaatcgaagcgcagccgcaattcatcgaaccgcgccagcaccgagagcgaggtttcgggagcagcccccagaaaaaaccccatgccgggatcaaggacaaggcggttgcgtttgataccggcacccgtcagcgccgcgatgcgcgcgtcaaagaacgccgcaatgtgatccatgatgtcgccagcgggtgcctcgcgccgatctgcctgcccgtcttgcaccgaatgcataacgacgagtttggcagatgatttcgccaattgcggatagaacgcagcgtctggaaaaccgcgaatatcattgagataggccacaccacgcgacaaggcataggcttgcgtcgcgggttgataactgtcgagcgagacgggaatgccatctgccttgagcgcgtccagcaccggcgcgatacgcgcgatttctgtgtcggacgaaacaggcgcggcgtcgggattgctggatgccggaccgaggtcgatcacatctgccccctcggccatcagcttacgcgcctgcgcaatggctgcgtctggcgccagataccggcctccatcggagaaactgtccgaggttatgttgacgatgccgaaaatgatgagcgatttattcat

SEQ ID NO: 4 - DNA, 1023 bp, Escherichia coli
  source 1..1023: mol_type = genomic DNA
atgaaaaagcctgaactcaccgcgacgtctgtcgagaagtttctgatcgaaaagttcgacagcgtctccgacctgatgcagctctcggagggcgaagaatctcgtgctttcagcttcgatgtaggagggcgtggatatgtcctgcgggtaaatagctgcgccgatggtttctacaaagatcgttatgtttatcggcactttgcatcggccgcgctcccgattccggaagtgcttgacattggggaattcagcgagagcctgacctattgcatctcccgccgtgcacagggtgtcacgttgcaagacctgcctgaaaccgaactgcccgctgttctgcagccggtcgcggaggccatggatgcgatcgctgcggccgatcttagccagacgagcgggttcggcccattcggaccgcaaggaatcggtcaatacactacatggcgtgatttcatatgcgcgattgctgatccccatgtgtatcactggcaaactgtgatggacgacaccgtcagtgcgtccgtcgcgcaggctctcgatgagctgatgctttgggccgaggactgccccgaagtccggcacctcgtgcacgcggatttcggctccaacaatgtcctgacggacaatggccgcataacagcggtcattgactggagcgaggcgatgttcggggattcccaatacgaggtcgccaacatcttcttctggaggccgtggttggcttgtatggagcagcagacgcgctacttcgagcggaggcatccggagcttgcaggatcgccgcggctccgggcgtatatgctccgcattggtcttgaccaactctatcagagcttggttgacggcaatttcgatgatgcagcttgggcgcagggtcgatgcgacgcaatcgtccgatccggagccgggactgtcgggcgtacacaaatcgcccgcagaagcgcggccgtctggaccgatggctgtgtagaagtactcgccgatagtggaaaccgacgccccagcactcgtccgagggcaaaggaa

SEQ ID NO: 5 - DNA, 774 bp, Escherichia coli
  source 1..774: mol_type = genomic DNA
gccaatcgactggcgagcggcatcgcattcttcgcatcccgcctctggcggatgcaggaagatcaacggatctcggcccagttgacccagggctgtcgccacaatgtcgcgggagcggatcaaccgagcaaaggcatgaccgactggaccttccttctgaaggctcttctccttgagccacctgtccgccaaggcaaagcgctcacagcagtggtcattctcgagataatcgacgcgtaccaacttgccatcctgaagaatggtgcagtgtctcggcaccccatagggaacctttgccatcaactcggcaagatgcagcgtcgtgttggcatcgtgtcccacgccgaggagaagtacctgcccatcgagttcatggacacgggcgaccgggcttgcaggcgagtgaggtggcaggggcaatggatcagagatgatctgctctgcctgtggccccgctgccgcaaaggcaaatggatgggcgctgcgctttacatttggcaggcgccagaatgtgtcagagacaactccaaggtccggtgtaacgggcgacgtggcaggatcgaacggctcgtcgtccagacctgaccacgagggcatgacgagcgtccctcccggacccagcgcagcacgcagggcctcgatcagtccaagtggcccatcttcgaggggccggacgctacggaaggagctgtggaccagcagcacaccgccgggggtaaccccaaggttgagaagctgaccgatgagctcggcttttcgccattcgtattgcac

SEQ ID NO: 6 - DNA, 609 bp, Escherichia coli
  source 1..609: mol_type = genomic DNA
gtatgacgtctgtcgcacctgcttgatcgcggccgcgatagctagatcgcgttgctcctcttctccatccgcgttccaagctgcggaaaggcacccataagcgtacgcctggtcgagcaggcgacgcggatcgacgtccagcgcacgagagaatgcgtccgccatctgtgcaatgcgtctaggatcgagacaaaggtcgtctctgtcagccggatcgtagaacatattggcggcgccaaagcccacttcaccgaccagaccgacgggatctatcaccagccagccgcgactggagaacatgatgttttcatgatgcagatcgccatgtagcccacgcagttccgaggcattgctcatcatttgatcggctataatcgccgcgtggacgtagtcagtttgacaacctgcgttttgatcatcgcgcgcccgctgaaacaaagctgcaaagcgatcccggatcgggagaagggcagaaggcaggggttcctcagatgcggcatacagcttcgccattagttccgctgcaatttcggtcgcctggtagtcgccgtgctcggcaacgatgtgagagagcattcgctccccggcatattcgagcaacatcagatt

SEQ ID NO: 7 - DNA, 789 bp, Escherichia coli
  source 1..789: mol_type = genomic DNA
tttaccaactgacttgatgatctcgcctttcacaaagcgaataaattcttccaagtgatctgcgcgtgaggccaagtgatcttctttttgtcccagataagcttgcttagcttcaagtaagacgggctgatactgggcaggtaggcgttttattgcccagtcggcagcgacatccttcggcgcgattttgccggttattgcgctgtaccaaatgcgggacaacgtaagcactacatttcgctcatcgccggcccagtcgggctgcgagttccatagcttcaaggtttccctcagcgcctcgaatagatcctgttcaggaaccgggtcaaagaattcctccgctgccggacctaccaaggcaacgctatgttctcttgcttttgtaagcaggatagctagatcaatgtcgatcatggctggctcgaagatacccgcaagaatgtcattgcgctgccattctccaaattgcagctcgcgcttagccggataacgccacgggatgatgtcgtcatgcacgacaagggtgacttctatagcgcggagcgtctcgctctcgccagggaaagccgaagcctccataaggtcattgagcaatgctcgccgcgtcgtttcatcaagctttacggccacagtaaccaacaaatcaatatcgctgtatggcttcaggccgccatccactgcggagccgtacaaatgcacggccagcaacgttgattccagatggcgctcaatgacgcttagcacctctgatagttggttcgaaatttcgatggtcaccgctaccctcat

SEQ ID NO: 8 - DNA, 825 bp, Escherichia coli
  source 1..825: mol_type = genomic DNA
accccaagtcagagggtccaatcgcagatagaaggcaaggcgttcgcggtcgggggcttcgatccccaatacattgaataggacagcgaaggcgcgctctgcttcatctggcgctgcccagttctcttcggcgttagcaatcatgagtgccaaatcggcatagcgatctgctgttccgagccgcccaaggtcgatcagacccgtgcattgaagagttttagggtccaccatgaagttcggcatgcagggatcaccatggcaaacaaccatatcggtgcgctcttggtcgagccgcaccggtagctctcgttcgacacgagccaaaagatcgagctgcggcgtactcttgtcctcgtccggtaagaagtcgggattgacggcattgcgggacaccacatcaacggcgcgtccgaacattcgcgacagcctgcgctcaaacggacattgatcaaccgataggctgtgaacagcgccaagttgctgccccattgacggccacgctttgagcaaatccgctccagacagatcagccgccggtactcccggaattgccgttatcaccaagcatgcaccctcctgttcctcctgccagttgatcacctcggggcaagccacacctcgacctttgagccaaatgaggcggtcacgctctccagcgagctcaccgcggcgggaagcaggtgcgattttcgcgaaggcatgcccgtcaccacgtcgaaaaacaaaatcaccagattctccgcctctgacaggcaaccagtcagaatgcgattcaccaaaaaaaatattagttcgattcaatggaggttccttcagttttctgat

SEQ ID NO: 9 - DNA, 789 bp, Escherichia coli
  source 1..789: mol_type = genomic DNA
tttgccgactaccttggtgatctcgcctttcacgtagtgaacaaattcttccaactgatctgcgcgcgaggccaagcgatcttcttcttgtccaagataagcctgtctagcttcaagtatgacgggctgatactgggccggcaggcgctccattgcccagtcggcagcgacatccttcggcgcgattctgccggttactgcgctgtaccaaatgcgggacaacgtaagcactacatttcgctcatcgccagcccagtcgggcggcgagttccatagcgttaaggtttcatttagcgcctcaaatagatcctgttcaggaaccggatcaaagagttcctccgccgctggacctaccaaggcaacgctatgttctcttgcttttgtcagcaagatagccagatcaatgtcgatcgtggctggctcgaagatacctgcaagaatgtcattgcgctgccattctccaaattgcagttcgcgcttagctggataacgccacggaatgatgtcgtcgtgcacaacaatggtgacttctacagcgcggagaatctcgctctctccaggggaagccgaagtttccaaaaggtcgttgatcaaagctcgccgcgttgtttcatcaagccttacggtcaccgtaaccagcaaatcaatatcactgtgtggcttcaggccgccatccactgcggagccgtacaaatgtacggccagcaacgtcggttcgagatggcgctcgatgacgccaactacctctgatagttgagtcgatacttcggcgatcaccgcttccctcat

SEQ ID NO: 10 - DNA, 1233 bp, Escherichia coli
  source 1..1233: mol_type = genomic DNA
atgcaaaataaattagcttccggtgccaggcttggacgtcaggcgttacttttccctctctgtctggtgctttacgaattttcaacctatatcggcaacgatatgattcaacccggtatgttggccgtggtggaacaatatcaggcgggcattgattgggttcctacttcgatgaacgcgtatctggcgggcgggatgtttttacaatggctgctggggccgctgtcggatcgtattggtcgccgtccggtgatgctggcgggagtggtgtggtttatcgtcacctgtctggcaatattgctggcgcaaaacattgaacaattcaccctgttgcgcttcttgcagggcataagcctctgtttcattggcgctgtgggatacgccgcaattcaggaatccttcgaagaggcggtttgtatcaagatcaccgcgctgatggcgaacgtggcgctgattgctccgctacttggtccgctggtgggcgcggcgtggatccatgtgctgccctgggaggggatgtttgttttgtttgccgcattggcagcgatctcctttttcggtctgcaacgagccatgcctgaaaccgccacgcgtataggcgagaaactgtcactgaaagaactcggtcgtgactataagctggtgctgaagaacggccgctttgtggcgggggcgctggcgctgggattcgttagtctgccgttgctggcgtggatcgcccagtcgccgattatcatcattaccggcgagcagttgagcagctatgaatatggcttgctgcaagtgcctattttcggggcgttaattgcgggtaacttgctgttagcgcgtctgacctcgcgccgcaccgtacgttcgctgattattatgggcggctggccgattatgattggtctattggtcgctgctgcggcaacggttatctcatcgcacgcgtatttatggatgactgccgggttaagtatttatgctttcggtattggtctggcgaatgcgggactggtgcgattaaccctgtttgccagcgatatgagtaaaggtacggtttctgccgcgatgggaatgctgcaaatgctgatctttaccgttggtattgaaatcagcaaacatgcctggctgaacgggggcaacggactgtttaatctcttcaaccttgtcaacggaattttgtggctgtcgctgatggttatctttttaaaagataaacagatgggaaattctcacgaagggtaa

SEQ ID NO: 11 - DNA, 687 bp, Escherichia coli
  source 1..687: mol_type = genomic DNA
gtccacttgcggtttcattgttactttgtcatagcgtcgtgtcagaatgcggcagagaacagcgtttactatcaacgcaacaccagaccagaaaaaccatgtattaacacctataacctcaacaaccggacctgcaacaagtaagcctatcggcatagaaagagtcatggcggtcatcaaaagggaaaacaccttgcccatcatttcaggggcaatgctttcttgaacataagccataacaggaacattcataaatgtgccagaggcgcccaagaagaagcagcatataacaaatatccaaaaaccgcttgtcggtagcgctccgctaatcagtgtagccagacccattaagccaatagctaaggatgccatgaaaaaccttcttttcatgccgccccatacaccgataaccaaagatgaaagaagcaatccacctgcaaagacaaattccacaatgctattgtgccaggcttcacccataaagtggctgcgtgccagtagagggaacagagaacctaatggcatataaagtatggtcatcagcagcatgggggaaaacacagccattaaaggtttatttgctttcattgcgataaagccctgcttcatgtcagacaatacactcatcttctcattggtttgcgtaatgtctggaattataacaaataggaggcaaactatcgcaaa

SEQ ID NO: 12 - DNA, 813 bp, Escherichia coli
  source 1..813: mol_type = genomic DNA
atgagccatattcaacgggaaacgtcttgctcgaggccgcgattaaattccaacctggatgctgatttatatgggtataaatgggctcgcgataatgtcgggcaatcaggtgcgacaatctatcgattgtatgggaagcccgatgcgccagagttgtttctgaaacatggcaaaggtagcgttgccaatgatgttacagatgagatggtcagactaaactggctgacggcatttatgcctcttccgaccatcaagcattttatccgtactcctgatgatgcatggttactcaccactgcgctccccgggaaaacagcattccaggtattagaagaatatcctgattcaggtgaaaatattgttgatgcgctggcagcgttcctgcgccggttgcattcgattcctgttagtaattgtccttttaacagcgatcgcgtatttcgtctcgctcaggcgcaatcacgaatgaataacggtttggttgatgcgagtgattttgatgacgagcgtaatggctggcctgttgaacaagtctggaaagaaatgcataagcttttgccattctcaccggattcagtcgtcactcatggtgatttctcacttgataaccttatttttgacgaggggaaattaataggttgtattgatgttggacgagtcggaatcgcagaccgataccaggatcttgccatcctatggaactgcctcggtgaattttctccttcattacagaaacggctttttcaaaaatatggtattgataatcctgatatgaataaattgcagtttcatttgatgctcgatgagtttttc

SEQ ID NO: 13 - DNA, 5239207 bp, Escherichia coli (residues 1-1,746,403 of 5,239,207)
  source 1..5239207: mol_type = genomic DNA
agcttttcattctgactgcaatgggcaatatgtctctgtgtggattaaaaaaagagtctctgacagcagcttctgaactggttacctgccgtgagtaaattaaaattttattgacttaggtcactaaatactttaaccaatataggcatagcgcacagacagataaaaattacagagtacacaacatccatgaaacgcattagcaccaccattaccaccaccatcaccattaccacaggtaacggtgcgggctgacgcgtacaggaaacacagaaaaaagcccgcacctgacagtgcgggctttttttttcgaccaaaggtaacgaggtaacaaccatgcgagtgttgaagttcggcggtacatcagtggcaaatgcagaacgttttctgcgggttgccgatattctggaaagcaatgccaggcaggggcaggtggccaccgtcctctctgcccccgccaaaatcaccaaccacctggtggcgatgattgaaaaaaccattagcggccaggatgctttacccaatatcagcgatgccgaacgtatttttgccgaacttttgacgggactcgccgccgcccagccgggattcccgctggcgcaattgaaaactttcgtcgaccaggaatttgcccaaataaaacatgtcctgcatggcattagtttgttagggcagtgcccggatagcattaacgctgcgctgatttgccgtggcgagaaaatgtcgatcgccattatggccggcgtgttagaagcgcgtggtcacaacgttaccgttatcgatccggtcgaaaaactactggcagtggggcattacctcgaatctaccgtcgatattgctgagtccacccgccgtattgcggcaagtcgtattccggctgatcacatggtgctgatggcaggcttcaccgccggtaatgaaaaaggcgaactggtggtacttggacgcaacggttccgactactccgcggcggtgctggctgcctgtttacgcgccgattgttgcgagatttggacggacgttgacggggtctatacctgcgacccgcgtcaggtgcccgatgcgaggttgttgaagtcgatgtcctaccaggaagcgatggagctttcctacttcggcgctaaagttcttcacccccgcaccattacccccatcgcccagttccagatcccttgcctgattaaaaataccggaaatcctcaagcaccaggtacgctcattggtgccagtcgtgatgaagacgaattaccggtcaagggcatttccaatctgaataacatggcaatgttcagcgtttccggcccggggatgaaaggaatggtcggcatggcggcgcgcgtctttgccgcgatgtcacgcgcccgtatttccgtggtgctgattacgcaatcatcttccgaatacagtatcagtttctgcgttccgcaaagcgactgtgtgcgggctgaacgggcaatgcaggaagagttctacctggaactgaaagaaggcttactggagccgctggcggtgacggaacggctggccattatctcggtggtaggtgatggtatgcgtaccttgcgtgggatctcggcgaaattctttgccgcgctggcccgcgccaatatcaacattgtcgctattgctcagggatcttctgaacgctcaatctctgtcgtggtaaataacgatgatgcgaccactggcgtgcgcgttactcatcagatgctgttcaataccgatcaggttatcgaagtgtttgtgattggcgtcggtggcgttggcggtgcgctgctggagcaactgaagcgtcaacaaagctggctgaagaataaacatatcgacttacgtgtctgcggtgttgccaactcgaaggcactgctcaccaatgtgcatggcctaaatctggaaaactggcaggaagaactggcgcaagccaaagagccgtttaatctcgggcgcttaattcgcctcgtgaaagaatatcatctgctgaacccggtcattgttgactgcacctccagccaggcagtggcggatcaatatgccgacttcctgcgcgaaggtttccacgttgtcacgccgaacaaaaaggccaacacctcgtcgatggattactaccatctgttgcgtcatgcggcggaaaaatcgcggcggaaattcctctatgacaccaacgttggggctggattaccggttattgaaaacctgcaaaatctgctcaatgctggtgatgaattgatgaagttctccggcattctttcaggatcgctttcttatatcttcggcaagttagacgaaggcatgagtttctccgaggcgaccacgctggcacgggaaatgggttataccgaaccggatccgcgagatgatctttctggtatggatgtggcgcgtaaactattgattctcgcccgtgaaacgggacgtgaactggagctggcggatattgaaattgaacctgtgctgcccgcagagtttaacgccgagggtgatgttgccgcttttatggcgaatctgtcacagctcgacgatcgctttgccgcgcgcgtggcgaaggcccgtgatgaaggaaaagttttgcgctatgttggcaatattgatgaagatggcgtctgtcgcgtgaagattgccgaagtggatggtaatgatccgctgttcaaagtgaaaaatggcgaaaacgccctggccttctatagccactattatcagccgctgccgttggtgctgcgcggatatggtgcgggcaatgacgttaccgctgctggtgtctttgccgatctgctgcgtaccctctcatggaagttaggagtctgacatggttaaagtttatgccccggcttccagtgccaatatgagcgtcgggtttgatgtgctcggggcggcggtgacacccgttgatggtgcattgctcggagatgtagttacggttgaggcggcagagatattcagtctcaacaacctcgggcgctttgccgataagctgccgtcagaaccacgggaaaatatcgtttatcagtgctgggagcgtttttgccaggagcttggcaagcaaattccagtggcgatgactctggaaaagaatatgccgatcggttcgggcttaggctccagcgcctgttcggtggtcgcggcgctgatggcgatgaatgaacactgcggcaagccgcttaatgacactcgtttgctggctttgatgggcgagctggaaggacgtatctccggcagcattcattacgacaacgtggcaccgtgttttctaggtggtatgcagttgatgatcgaagaaaacgacatcatcagccagcaagtgcctgggtttgatgagtggctgtgggtgctggcgtatccggggattaaagtctcgacggcagaagcccgggctattttaccggcgcagtatcgccgccaggattgcattgcgcacgggcgacatctggcaggcttcattcacgcctgctattcccgtcagcctgagcttgccgcgaagctgatgaaagatgttatcgctgaaccctaccgtgaacgattactgccaggcttccggcaggcgcggcaggcggtcgcggaaatcggcgcggtagcgagcggtatctccggctccggcccgaccttgttcgctctgtgtgacaagccggataccgcccagcgcgttgccgactggttgggtaagaactacctgcaaaatcaggaaggttttgttcatatttgccggctggatacggcgggcgcacgagtactggaaaactaaatgaaactctacaatctgaaagatcacaacgagcaggtcagctttgcgcaagccgtaacccaggggttgggcaaaaatcaggggctgttttttccgcatgacctgccggaattcagcctgactgaaattgatgagatgctgaagctggattttgtcacccgcagtgcgaagatcctctcggcgtttattggtgatgaaatcccgcaggaaatcctggaagagcgcgtgcgcgcggcgtttgccttcccggctccggtcgccaatgttgaaagcgatgtcggttgtctggaattgttccacgggccaacgctggcatttaaagatttcggcggtcgctttatggcacaaatgctgacccatattgcgggtgataagccagtgaccattctgaccgcgacctccggtgataccggagcggcagtggctcatgctttctacggtttgccgaatgtgaaagtggttatcctctatccacgaggcaaaatcagtccactgcaagaaaaactgttctgtacattgggcggcaatatcgaaactgttgccatcgacggcgatttcgatgcctgtcaggcgctggtgaagcaggcgtttgatgatgaagaactgaaagtggcgctggggttaaactcagctaactcgattaacatcagccgtttgctggcgcagatttgctactactttgaagctgttgcgcagctgccgcaggaggcgcgcaaccagctggttgtttcggtaccaagcggaaacttcggcgatttgacggcgggtctgctggcgaagtcactcggtctgccggtgaaacgttttattgctgcgaccaacgtgaacgataccgtgccacgtttcctgcacgacggtcagtggtcccccaaagcgactcaggcgacgttatccaacgcgatggacgtgagtcagccgaacaactggccgcgtgtggaagagttgttccgccgcaaaatctggcaactgaaagagctgggttatgcagccgtggatgatgaaaccacgcaacagacaatgcgtgagttaaaagaactgggctacacctcggagccgcacgctgccgtagcgtatcgtgcgctgcgtgaccagttgaatccaggcgaatatggcttgttcctcggcaccgcgcatccggcgaaatttaaagagagcgtggaagcgattctcggtgaaacgttggatctgccaaaagagctggcagaacgtgctgatttacccttgctttcacataatctgcccgccgattttgctgcgttgcgtaaattgatgatgaatcatcagtaacatctattcattatctcaatcaggccgggtttgcttttatgcagcccggcttttttgtgaagaaaatatggagagaaacgacagggaaaaaggagaaattctcaataaatgcggtaacttagagattaggattgcggagaataacaaccgccgttctcatcgcgtaatctccggatatcgacccataacgggcaatgataaaaggagtaacctgtgaaaaagatgcaatctatcgtactcgcactttccctggttctggtcgctcccatggcagcgcaggctgcggaaattacgttagtcccgtcagtaaaattacagataggcgatcgtgataatcgcggttattactgggatggcggtcactggcgcgaccacggctggtggaaacaacattatgaatggcgaggcaatcgctggcacccacacggaccgccgccaccgccgcgtcaccataagaaagctcatcatgatcatcacggcggtcatggtccaggcaaacatcaccgctaaatgacaaatgccgggtaacaatccggcattcagcgcctgatgcgacgctggcgcgtcttatcaggcctacgtgaattctgcaatatattgaatctgcatgcttttgtaggccggataaggcgttcacgccgcatccggcattgactgcaaacttaacgctgctcgtagcgtttaaacaccagttcgccattgctggaggaagcttcatcaaagaagtaaccttcgctattaaaaccagtcagttgctctggtttggtcagccgattttcaataataaaacgactcatcagaccgcgtgctttcttagcgtagaagctgattatcttaaatttgccgttcttctcatcgaggaacaccggcttgataatctcggcattcaatttcttcggcttcaccgatttaaaatactcatctgacgccagattaatcaccacattatcgccttgtgctgcgagcgcctcgttcagcttgttggtgatgatatctccccagaattgatacagatctttccctcgggcattctcaagacggatccccatttccagacgataaggctgcattaaatcgagcgggcgcagtacgccatacaagccggaaagcattcgcaaatgctgttgggcaaaatcgaaatcgtcttcgctgaaggtttcggcctgcaagccggtgtagacatcacctttaaacgccagaatcgcctggcgggcattctccggcgtgaaatctggctgccagtcatgaaagcgagcggcgttgatacccgccagtttgtcgctgatgcgcatcagcgtgctaatctgcggaggcgtcagtttccgcgcttcatggatcaactgctgggaattgtctaacagctccggcagcgtatagcgcgtggtggtcaacgggctttggtaatcaagcgttttcgcaggtgaaataagaatcagcatatccagtccttgcaggaaatttatgccgactttagcaaaaaaagagaatgagttgatcgatagttgtgattactcctgcgaaacatcatcccacgcgtccggagaaagctggcggccgatatccggataacgcaacggatcaaacaccgggcgcacgccgagtttacgctggcgtagataatcactggcaatggtatgaaccacaggcgagagcagtaaaatggcggtcaaattggtaatagccatgcaggccattatgatatctgccagttgccacatcagcggaagacttagcaaggtgccgccgatgaccgttgcgaaggtgcagatccgcaaacaccagatcgctttagggttgttcaggcgtaaaaagaagagattgttttcggcgtaaatgtagttggcaacgatggagctgaaggcaaacagaataaccacgagggtaacaaactcagcaccccaggaacccattagcacccgcatcgccttctggataagctgaataccttccagcggcatgtaggttgtgccgttacccgccagtaatatcagcatggcgcttgccgtacagatgaccagggtgtcgataaaaatgccaatcatctggacaatcccttgcgctgccggatgcggaggccaggacgccgctgccgctgccgcgtttggcgtcgaccccattcccgcctcattggaaaacatactgcgctgaaaaccgttagtaatcgcctggcttaaggtatatcccgccgcgccgcctgccgcttcctgccagccaaaagcactctcaaaaatagaccaaatgacgtggggaagttgcccgatattcattacgcaaatcaccaggctggtcagtacccagattatcgccatcaacgggacaaacccctgcatgagccgggcgacgccatgaagaccgcgagtgatcgccagcagagcaaagacagcgagaataatacctgtcaccagcgggggaaaatcaaaagaaaaactcagggctcgcgcaacggcgttcgcctgaattccgctgaaaattatgccgtaggcgatgagcaaaaagacggcgaacagaacgcccatccagcgcatccccagcccgcgcgccatataccatgccggtccgccacgaaactgcccattggcatcacgttctttataaagctgtgcgagggaacattcggcaaacgaggtcgccatgccgataaacgcggcaacccacatccagaagacggctccaggtccaccggcggtaattgccagcgcaacgccggccaggttgccgctacccacgcgcgccgcaagactggtacacaatgactgaaatgaggttaaaccgcctggctgtggatgaatgctatttttaagacttttgccaaactggcggatgtagcgaaactgcacaaatccggtgcgaaaagtgaaccaacaacctgcgccgaagagcaggtaaatcattaccgatccccaaaggacgctgttaataaaggagaaaaaatctggcatgcatatccctcttattgccggtcgcgatgactttcctgtgtaaacgttaccaattgtttaagaagtatatacgctacgaggtacttgataacttctgcgtagcatacatgaggttttgtataaaaatggcgggcgatatcaacgcagtgtcagaaatccgaaacagtctcgcctggcgataaccgtcttgtcggcggttgcgctgacgttgcgtcgtgatatcatcagggcagaccggttacatccccctaacaagctgtttaaagagaaatactatcatgacggacaaattgacctcccttcgtcagtacaccaccgtagtggccgacactggggacatcgcggcaatgaagctgtatcaaccgcaggatgccacaaccaacccttctctcattcttaacgcagcgcagattccggaataccgtaagttgattgatgatgctgtcgcctgggcgaaacagcagagcaacgatcgcgcgcagcagatcgtggacgcgaccgacaaactggcagtaaatattggtctggaaatcctgaaactggttccgggccgtatctcaactgaagttgatgcgcgtctttcctatgacaccgaagcgtcaattgcgaaagcaaaacgcctgatcaaactctacaacgatgctggtattagcaacgatcgtattctgatcaaactggcttctacctggcagggtatccgtgctgcagaacagctggaaaaagaaggcatcaactgtaacctgaccctgctgttctccttcgctcaggctcgtgcttgtgcggaagcgggcgtgttcctgatctcgccgtttgttggccgtattcttgactggtacaaagcgaataccgataagaaagagtacgctccggcagaagatccgggcgtggtttctgtatctgaaatctaccagtactacaaagagcacggttatgaaaccgtggttatgggcgcaagcttccgtaacatcggcgaaattctggaactggcaggctgcgaccgtcttaccatcgcacctacactgctgaaagagctggctgagagcgaaggggctatcgaacgtaaactgtcttacaccggcgaagtgaaagcgcgtccggcgcgtatcactgagtccgagttcctgtggcagcacaaccaggatccaatggcagtagataaactggcggaaggtatccgtaagtttgctattgaccaggaaaaactggaaaaaatgatcggcgatctgctgtaatcattcttagcgtgaccgggaagtcggtcacgctacctcttctgaagcctgtctgtcactcccttcgcagtgtatcattctgtttaacgagactgtttaaacggaaaaatcttgatgaatactttacgtattggcttagtttccatctctgatcgcgcatccagcggcgtttatcaggataaaggcatccctgcgctggaagaatggctgacatcggcgctaaccacgccgtttgaactggaaacccgcttaatccccgatgagcaggcgatcatcgagcaaacgttgtgtgagctagtggatgaaatgagttgccatctggtgctcaccacgggcggaactggcccggcgcgtcgtgacgtaacgcccgatgcgacgctggcagtagcggaccgcgagatgcctggctttggtgaacagatgcgccagataagcctgcattttgtaccaactgcgatcctttcgcgtcaggttggtgtgattcgcaaacaggcgctgatccttaacttacccggtcagccgaagtctattaaagagacgctggaaggtgtgaaggacgctgcgggtaacgttgtggtacacggtatttttgccagcgtaccgtactgcattcagttgctggaagggccatacgttgaaacggcaccagaagtggttgctgcattcagaccgaagagtgcaagacgcgacgttagcgaataaaaaaatccccccgagcggggggatctcaaaacaattagtgggattcaccaatcggcagaacggtgcgaccaaactgctcgttcagtacttcacccatcgccagatagattgcactggcaccacagatcagaccaatccagccggcaaagtggatgattgcggcgttaccggcaatgttaccgatcgccagcagggcaaacagcacagtcaggctaaagaaaacgaattgcagaacgcgtgcgcctttcagcgtgccgaagaacataaacagcgtaaatacgccccacagacccaggtagacaccaaggaactgtgcatttggcgcatcggtcagacccagtttcggcatcagcagaatcgcaaccaacgtcagccagaaagaaccgtaagaggtgaatgcggttaaaccgaaagtgttgccttttttgtactccagcagaccggcaaaaatttgcgcgatgccgccgtagaaaatgcccatggcaagaataataccgtccagagcgaaataacccacgttgtgcaggttaagcagaatggtggtcatgccgaagcccatcaggcccagcggtgccggattagccaacttagtgttgcccataattcctcaaaaatcatcatcgaatgaatggtgaaataatttccctgaataacagtagtgttttcagggcgcggcataataatcagccagtggggcagtgtctacgatcttttgaggggaaaatgaaaattttccccggtttacggtgtcagacctgagtggcgctaaccatccggcgcaggcaggcgatttgcagtacggctggaattgtcacgcgataggcactgccgctgaccgctttaaccccatttaatgctgcgcccacagggcctcccagacccgcgccgcgcagcaaaccatgcccaagcacgctcattgctgcgtgggtgcgtaaaatgcgggtcaattggctggaaagcaaatgcgacacgccttttgccaataatttgtctttcatcagcagcggcagcagctcttccagctcattcaccctggcatcgaccgcgtgcagaaactcctgcttatgttcctcgtccatattcttccaggtgttacgcagaaattgttccagtaactgttgctcaatctcaaacgtagacatctctttgtcggctttcagcttcaatcgttttgaaacatcgagcaaaatggcccgatacaatttaccgtgtccgcgcagtttgttggcgatactatcgccaccaaaatgctgtaattctccagcaatcagctgccagttgcggcgatgttgctcgggatgcccttccatcgatttaaacagttcgttgcgcatcagtacgctggagaggcgagttttgcctttttcattatgggtgagcaatcgggcgaaatttgccaactgttcctcactacaatgctgaagaaaatccagatctgaatcattcaggtaattaacattcattttttgtggtttctatattctggcgttagtcgtcgccgataattttcagcgtggccatatccgatgagttcaccgtatgaccggaaaaggtgatttttgagacgcagcgtttattgtcgttatcactgttaatgttgatccagtcagtggtttgcccttcttttatttctgaaggaatattcagactctgactggcgctacgggcggctttgaaataaaccgatgcaccgcttaactgtaaatcgccatggtcggcagagagttgtatgcgtttcacaatgcgacaaacaggaagtttcagcgccagatcgttggtttcgttacgcggcattgcaatgacgccgaggagtttatggtcgtttgcctgcgccgtgcagcacagcatcaggctaatcgccaggctggcggaaatcgtaaaaacggatttcataaggattctcttagtgggaagaggtagagggatgaatacccactagtttactgctgataaagagaaggttcaggtacgtaatcttttctttttattacaattttttgatgaatgccttggctgcgattcattctttatctgaataaaattgctgtcaattttacgtcttgtcctgccatatcgcgaaatttctgcgcaaaagcacaaaaaatttttgcatctcccccttgatgacgtgggttacgaccccatttagtagtcaaccgcagtgagtgagtctgcaaaaaaatgaaattgggcagttgaaaccagacgtttcgcccctattacagactcacaaccacatgatgaccgaatatatagtggagacgtttagatgggtaaaataattggtatcgacctgggtactaccaactcttgtgtagcgattatggatggcaccactcctcgtgtgctggagaacgccgaaggcgatcgcaccacgccttctatcattgcctatacccaggatggtgaaactctggttggtcagccggctaaacgtcaggcagtgacgaacccgcaaaacaccctgtttgcgattaaacgcctgattggccgccgcttccaggacgaagaagtacagcgtgatgtttccatcatgccgttcaaaattattgctgctgataacggcgacgcatgggtcgaagttaaaggccagaaaatggcaccgccgcagatctctgctgaagtgctgaaaaaaatgaagaaaaccgctgaagattacctgggtgaaccggtaactgaagctgttatcaccgtaccggcatactttaacgatgctcagcgtcaggcaaccaaagacgcaggccgtatcgctggtctggaagtaaaacgtatcatcaacgaaccgaccgcagctgcgctggcttacggtctggacaaaggtactggcaaccgtactatcgcggtttatgacctgggtggtggtactttcgatatttctattatcgaaatcgacgaagttgacggcgaaaaaaccttcgaagttctggcaaccaacggtgatacccacctgggtggtgaagacttcgacagccgtctgatcaactacctggttgaagaattcaagaaagatcagggcattgacctgcgcaacgatccgctggcaatgcagcgcctgaaagaagcggcagaaaaagcgaaaatcgaactgtcttccgctcagcagaccgacgttaacctgccgtacatcactgcagatgcgaccggtccgaaacacatgaacatcaaagtgactcgtgcgaaactggaaagcctggttgaagatctggtaaaccgttccattgagccgctgaaagttgcactgcaggacgctggcctgtccgtatctgatatcgacgacgttatcctcgttggtggtcagactcgtatgccaatggttcagaagaaagttgctgagttctttggtaaagagccgcgtaaagacgttaacccggacgaagctgtagcaatcggtgctgctgttcagggtggtgttctgactggtgacgtgaaagacgtactgctgctggacgttaccccgctgtctctgggtatcgaaaccatgggcggtgtgatgacgacgctgatcgcgaaaaacaccactatcccgaccaagcacagccaggtgttctctaccgctgaagacaaccagtctgcggtaaccatccatgtgctgcagggtgaacgtaaacgtgcggctgataacaaatctctgggtcagttcaacctggatggtatcaacccggcaccgcgcggcatgccgcagatcgaagttaccttcgatatcgatgctgacggtatcctgcacgtttccgcgaaagataaaaacagcggtaaagagcagaagatcaccatcaaggcttcttctggtctgaacgaagatgaaatccagaaaatggtacgcgacgcagaagctaacgccgaagctgaccgtaagtttgaagagctggtacagactcgcaaccagggcgaccatctgctgcacagcacccgtaagcaggttgaagaagcaggcgacaaactgccggctgacgacaaaactgctatcgagtctgcactgactgcactggaaactgctctgaaaggtgaagacaaagccgctatcgaagcgaaaatgcaggaactggcacaggtttcccagaaactgatggaaatcgcccagcagcaatatgcccagcaacatgcccagcagcagactgccggtgctgatgcttctgcaaacaacgcgaaagatgacgatgttgtcgacgctgaatttgaagaagtcaaagacaaaaaataatcgccctataaacgggtaattatactgacacgggcgaaggggaatttcctctccgcccgtgcattcatctaggggcaatttaaaaaagatggctaagcaagattattacgagattttaggcgtttccaaaacagcggaagagcgtgaaatcaaaaaggcctacaaacgcctggccatgaaataccacccggaccgtaaccagggtgacaaagaggccgaggcgaaatttaaagagatcaaggaagcttatgaagttctgaccgactcgcaaaaacgtgcggcatacgatcagtatggtcatgctgcgtttgagcaaggtggtatgggcggcggcggttttggcggcggcgcagacttcagcgatatttttggtgacgttttcggcgatatttttggcggcggacgtggtcgtcaacgtgcggcgcgcggtgctgatttacgctataacatggagctcaccctcgaagaagctgtacgtggcgtgaccaaagagatccgcattccgactctggaagagtgtgacgtttgccacggtagcggtgcaaaaccaggtacacagccgcagacctgtccgacctgtcatggttctggtcaggtgcagatgcgtcagggattcttcgctgtacagcagacctgtccacactgtcagggccgcggtacgctgatcaaagatccgtgcaacaaatgtcatggtcatggtcgtgttgagcgcagcaaaacgctgtccgttaaaatcccggcaggagtggacactggagaccgcatccgtcttgcgggcgaaggtgaagcgggcgagcatggcgcaccggcaggcgatctgtacgttcaggttcaggttaaacagcacccgattttcgagcgtgaaggcaacaacctgtattgcgaagtcccgatcaacttcgctatggcggcgctgggtggcgaaatcgaagtaccgacccttgatggtcgcgtcaaactgaaagtgcctggcgaaacccagaccggtaagcttttccgtatgcgcggtaaaggcgtcaagtctgtccgcggtggcgcacagggtgatttgctgtgccgcgttgtcgtcgaaacaccggtaggcctgaacgagaagcagaaacagctgctgcaagagctgcaagaaagcttcggtggcccaaccggcgagcacaacagcccgcgctcaaagagcttctttgatggtgtgaagaagttttttgacgacctgacccgctaacctccccaaaagcctgcccgtgggcaggcctgggtaaaaccagggtgcgttgaagatatgcgagcacctgaaaagtggcggggatcactcccataagcgctaacttaagggttgaaccatctgaagaatgcgacgcctcggtgcctcgttaagacgatgcctcgcgttcttcaattgcgttttgtaggctgtcagggatactgtcccacgaatggccacctgtaagctccagatgaccatttttgttattctccacaacgagttagttcttcttttcggatccggcacttctggggggggaaatccagcgatggctggattatgtcgtcaattaaaaatgcggcgagtagattagcaaatatccacgctttcgcgagttcaggttcctttgcacgcaaagcatccaggtgcagcaaacttttgagccgcttaaaagccagttcaatttgccatcgcagacggtaacaatcagccacttgctctgctgaatattcatcttccggtaatgatgttagcaatagcacatggcccgctgcttccagcgtttccgcctgaactactcgtccttttcgacgattctcgctgagcagtcgggttttactgattaatgctttttcgggaggaagtgatacggcaatgagacgtgccggaaagggagctccggcttttttattacctgaattgcctatcattacagtggtttcaccgttcttaccgcaatccagcccgcgcagaaaacccatcatgtcaaagcgcattccttctgcagttaaccagcgcaatcctcgccagtgaacccggacgatataatcagcttctccaaaagcaagtgagcggatacattcgggacgcgaaccgaatccccggtcagcaatgcgtatctcgtctgccgtttgcgcaaatcggtccagccgttcagcgtctctgctgtcggttagctcaaaatcagtgaactgacaggtatgaggatcatatcccatatgtagtcgccattcagcgctgccgcccccgggcgcactgattgctgttccatcgacaagacgcaatctctttccgcttgtacaacccgtaactgcggcgcgtacagcaagtgtttgtgcggcaagtatgccaaaccagtcggcggcattccgcagccgcttcaggagagccacgtcagataatgttgcaacgtcatggagctgagcccatgcagtgacttcacgtaatgacatccccccggggccgtaagccagccccagacgtagcagagttgcagcatcacgaatttcgcggcggcgggttagagccccggcattacgtgccgaagtatccagttcttcgggcttaccaatatgggccagaattgctgaccagttatcgtgagagtaattcatcggcacgttaaatcatatcaggcgtaataccacaacccttaagttagcgcttatgggatcactccccgccgttgctcttactcggattcgtaagccgtgaaaacagcaacctccgtctggccagttcggatgtgaacctcacagaggtcttttctcgttaccagcgccgccactacggcggtgatacagatgacgatcagggcgacaatcatcgccttatgctgcttcattgctctcttctccttgaccttacggtcagtaagaggcactctacatgtgttctgcatatagggggcctcgggttgatagtaaaatatcactcggggcttttctctatctgccgttcagctaatgcctgagacagatagcctcaagcacccgccgctattatatcgctctctttaactcattctgttttatcgattctaatcctgaagacgcctcgcattttgatggcgtaattttttaatgatttaattatttaactttaatttatctcttcatcgcaattattgacgacaagctggattatttttgaaatattggcctaacaaacatcgccgactgacaacaaattaattattacttttcctaattaatccctcagaaatcctcaccttaagctatgattatcagggcttagggtcactcgtcagcgcttacagccgtcaaaaacgcatctcaccgctgatggcgcaaattcttcaatggctcgtaaaaaacgaattattcctacactataatctgattttaacgatgattcgtgcggggtaaaatagtaaaaacgatctattcacctgaaagagaaataaaaagtgaaacatctgcatcgattctttagcagtgatgcctcgggaggcattattcttatcattgccgctatcctggcgatgatgatggccaacagcggcgcaaccagtggatggtatcacgactttctggagacgccggttcagctccgggttggttcactcgaaatcaacaaaaacatgctgttatggataaatgacgcgctgatggcggtatttttcctgttagtcggtctggaagttaaacgtgaactgatgcaaggatcgctagccagcttacgccaggccgcatttccagttatcgccgctattggtgggatgattgtgccggcattactctatctggcttttaactatgccgatccgattacccgcgaagggtgggcgatcccggcggctactgacattgcctttgcacttggtgtgctggcgctattgggaagtcgtgttccgttagcgctgaagatctttttgatggctctggctattatcgacgatcttggggccatcattatcatcgcattgttctacactaatgacttatcgatggcctctcttggcgtcgcggctgtagcaattgcggtactcgcggtattgaatctgtgtggtgtacgccgcacgggcgtctatattctggttggcgtagtgttgtggactgcggtgttgaaatcgggggttcacgcaactctggcgggggtaattgtcggcttctttattcctttgaaagagaagcatgggcgttctccagcgaagcgactggagcatgtgttgcacccgtgggtggcgtatctgattttgccgctgtttgcattcgctaatgctggcgtttctctgcaaggcgtcacgctggatggcttgacctccattctgccattggggatcatcgctggcttgctgattggcaaaccgctggggattagtctgttctgctggttggcgctgcgtttgaaactggcgcatctgcctgagggaacgacttatcagcaaattatggcggtggggatcctgtgcggtatcggttttactatgtctatctttattgccagcctggcctttggtagcgtagatccagaactgattaactgggcgaaactcggtatcctggtcggttctatctcttcggcggtaattggatacagttggttacgcgttcgtttgcgtccatcagtttgacaggacggtttaccggggagccataaacggctcccttttcattgttatcagggagagaaatgagcatgtctcatatcaattacaaccacttgtattacttctggcatgtctataaagaaggttccgtggttggcgcagcggaggcgctttatttgacaccacaaaccattaccggacagatccgggctctggaagagcgcctgcaaggcaaattatttaagcgcaagggacgtggtctcgaacccagcgagctgggagaactggtctatcgctatgccgataaaatgttcaccttaagccaggaaatgctggatattgtgaactatcgcaaagaatccaatttattgtttgacgttggcgtggctgatgcactttccaaacgcctggtcagtagcgtgctgaatgctgcagtggtagaaggcgagccgattcatcttcgctgcttcgaatccacccacgaaatgctactggagcaattaagccagcataaactggatatgatcatttccgactgtccgatagactctacgcagcaggaaggcctgttctccgtgagaattggcgaatgtggcgtgagtttctggtgtacaaatccaccaccagaaaaaccgttcccggcttgtctggaagaacggcgacttttgattcctgggcgacgttcaatgttagggcgcaaattgcttaactggtttaactcccagggattaaacgtagaaatcctcggcgagtttgatgatgccgcgttgatgaaagcttttggcgcaatgcacaatgcaatcttcgttgccccaacgctttatgcatatgacttttatgccgataaaactgtcgtagaaattggtcgcgtcgagaatgtgatggaagagtaccatgctatttttgctgagcggatgattcagcacccggcggtacagcgaatctgcaatacggattattctgcgctttttagtccagcggcgcgttaatcggcagctcccccaaagttaaagtggaggagatagattagttgtacataaccacgattttgactcggctcattatttgcccgcttgagacattatttccatatgtacgcgggcgaataaatagaggaatctgattacttccttcatggggatgctgaaaagagtagtaattgcttttaccatactggatttcattcgtaccatcattcgagagttgaaagcctacttgacccgcaccgtcctcactgttttctaactcattttttaatatgctggttcctgactcctgtatcgtcactggttcaaagtaatattcaacatcactgggttcaaaaactaattcaccttgctcgccctggatgcagtcaaatcttatatgatgaaactgataattttcattattgatacgagacagtacaaatcgtccagtgtcgatggattgatcttcaaaaccacaggtcattaaatttacctgtaaaatagtatttaaattataattaaagcggacgctattacaattagtattattccctgtacatgaactcacttcaatttcgaacaacaaaggaaaaggagttcctggaaaaatgtctgcggtgttagaactatctgatacagatgcgatagaatatggaatggtgaaatttatcgcagatagcatttcttctaaattataagatgacttccctggaagctctatttttttaccgtcatattcaaaggggaaattaataatataatgacgacttccgactttaaaccttaaagcgttctgtgttaaaaaatgaactttaatggcgttggttgtctcttgcaagtctgtacactcaatgatatttccggtgttttcaattttttcggcggtgagattacctttcatactcagtggcttgagtatatatgttccacgttgttcaccgacattggtcaatgcacagggagcactttgcacaataaaagaatatagactcaaggtgattaataaaagccacttcatagtaaactccttttactggcatatatatgttttgttttcatcaataacgtgttgaaaagtaatagtacagaataaattctgttcatcattgagagcaacttttatgccagttggaatttcatctacgcgaataaaaaggcgactaccctggccaacgactccaatatttttttcctggagatccagtacgtcatagccaaaggttaatggcgaaccatcgggacgcagtgcctgtatataccaaggcttacgttggtcagttgtaaactgcacataagaaactgctccacggtaaggcgcaataatttgacgattgccctgcaattctgtttcactttcactgtttgctatatcaagtaccagatggttttcacgatgaggtataatcgggtcgtaaacaacctggcctttgctgtttgttcggttgtatttttgtccattaatatgcgcgccttctaatccaggcgcatccagaattgcaaatgtatcggataactggttagtgatattaataccaccggaccagacaactaatccactactaatacttccaccactttgccaggcgtttttagaatgactatagctgccatctattatggcgatgggagttctccagcttaaattcgtaccaagcgaggtatcattattttgttgttgctgattaacatatataccataatttaactgatcatgttcaccggctatgccagtaattccagtattgttggaggaatagccatctttggaaaatgaggtcgaattcgataagttaatttggtgacgtgttttggcaatatcatccccccagtagaaaggaatggagataaacagattaaaacgctcctcttctttattattttcatcataagattggctggcagagaaagtataactaatgtgttgccagttattggagtaactgaattggtaatctttagcatttccacttcgcccccagtaattccgccaaagcgcacttaatgatacatttcccagattattggataaaggttgcataatattggcagaaaggctattttttctgccaatatcataaaaatcattataatcactctgatgatagtgtttatcattttcgtaaagatggtcgctgaatgtcctgtaatcctgcgaagcataacgccaggcggccacgctaaatcgagtggctgtttgtactagatatttattataggcgacctgatagctcgtaccttcgtgtctggtatcattatttaacttactactcgatcgggcagcgtaaaaagagatggcacccagcggtgtattccaaccatttcccagagttatagcattatagttatcggataaaatcgtacccgattatgtgatcaggttgttattatttagattaatgtttaaattttttaatttcttgatgtgaagttgatgaaagtttaatattcttaattattcccttctttataagaagagcaaggtgccattattagagtgagagagtaggatgtttcagagtatgcttcagattattttttattcctctgtagtgaattaataatcatcacagttaatttcattctgaaattacttcttttttgagattttttaattttgatgagctatgtttttcataaggaacatagactcgttgatgctctgaaggtattttctcatttccggggatgttttgtcgtaatcgtgcataaactttttcagttctttatacacatcattatttagctttacattgtcgcgaactaaagtttgtaccaatggtatcaaaatttcgaaacgggacggtttgtcatcaatacttgccagggttttgaatactcctgtgtatctgtaacctaagtgcttattgacaagttgagtggtccatcgaccaggcataatatcttcacagagcaaattttttattctggtattagtgaatgatgctccaaatatgttgctttttttaatgaagagattattaatttctccatttgaaaagatggtgtttgataagtcgctttcaaaacatgatatattggataatacacaactaaaataatacccatatgaaaggttgctcttttctattgttatatttgatagcgacattttatgtatattgatattaggggcagtcaaatactggatcttttgatcgttaagttcatacatctccagtgatttattatagggtaataaaagtataaattcctttatattatctccgcagtaagaaaagacgacatcaaatttattagtggccatattttcagttgagcagtaagctgatttttctattaaccgactgggtacgcttttaaataaagataattttccacatagttttgaatatgccgaattgctagttttaaaattctgccatgttattttctggttatcatctttcgatgaggaggggattttattgcattgttcattatatagctcagggaaaatatttttttaattagctttttgatttcctggttaagatgactttttttcttgtctattgcactatatttagcgttttgtgacgtctcctgatgagcataaaatgactggagatttctgcaggcctcataaaatatttcaggagtatatagctgtgggtatatttccgggttgaagtttgcctttaagaacttaacgaatttttcatagcattcttgatatatcttaatctcttcagaaagacattcgcttgttctgtcatcaaaaacatccaatctaagtaatgtgatgcctttgtgtttaaaaaataaaattgaactgtatgttctatgagtttacatctataaaaatgtgcatctctcagatgagtatattgaaaaaaatgatggaggactggagatggtttaggaaaatcctggcttctgaaaaagtcatcaaacaaaattaagaactctgttttatactcgcaaaacacttttactaactcattttgtcttgttttatttattattacatcatctactatatttgatttataaagacaatgtggcgaagttgagataccatctgtcattatcagtccttgaagttgatgaatttttattaatttaatttatgagtgaatgtgactactatcaaaaatcgctcattaattttaagaagtacaatataaataggtatttaacctgtgttgattgctgttaataatttacaaggtctaatgaggagatatttatgaatggttaaagtatataggaatttaattcaaaaatagagtggtcttaagtttaatacctcaatgtgtatcacaatatccacattctttgtagggggtctggagattgagtagatattcttgttcagaatgtatcagccgatggttctacgattcttaagccacgaagagttcagatagtacaacggcatgtctgcaagaacctgcaacttttgactatctggcaaccggcagtgtgttctctcacgcatcacaaaagcagcaggcataaaaaaacccgcttgcgcgggctttttcacaaagcttcagcaaattggcgattaagccagtttgttgatctgtgcagtcaggttagccttatgacgtgcagctttgtttttgtggatcagacctttagcagcctgacggtccacgatcggttgcatttcgttaaatgctttctgtgcagcagctttgtcgccagcttcgatagctgcgtatactttcttgatgaaagtacgcatcatagagcgacggcttgcgttgtgcttacgagccttttcagactgaatggcgcgcttcttagctgatttgatattagccaaggtccaactcccaaatgtgttctatatggacaattcaaaggccgaggaatatgcccttttagccttcttttgtcaatggatttgtgcaaataagcgccgttaatgtgccggcactcgttacgtagtgatggcgcaggattctaccagcttgcggggtgtgaatacagcttttccgcgataaaaattgcagcaggcggtcagtttcttcccgtgatttgcgccatggcaatgaaaagccacttctttctgatttcggtactcaatcgccggttaaccttgaccgctgtacaaggtatactcggacgattttcactgttttgagccagacatgaagctgatacgcggcatacataatctcagccaggccccgcaagaagggtgtgtgctgactattggtaatttcgacggcgtgcatcgcggtcatcgcgcgctgttacagggcttgcaggaagaagggcgcaagcgcaacttaccggtgatggtgatgctttttgaacctcaaccactggaactgtttgctaccgataaagccccggcacggctgacccggctgcgggaaaaactgcgttaccttgcagagtgtggcgttgattacgtgctgtgcgtgcgtttcgacaggcgtttcgcggcgttaaccgcgcaaaatttcatcagcgatcttctggtgaagcatttgcgcgtaaaatttcttgccgtaggggatgatttccgctttggcgctggtcgtgaaggcgatttcttgttattacagaaagctggcatggaatacggcttcgatatcactagtacgcaaactttttgcgaaggtggcgtgcgtattagcagcaccgctgtgcgtcaggcgctggcggatgacaatctggctctggcagaaagtttactggggcacccgtttgccatctccgggcgtgtagtccacggtgatgaattagggcgcactataggtttcccgacggcgaatgtaccgctacgccgtcaggtttccccggtgaaaggggtttatgcggtagaagtgctgggcctcggtgaaaagccgttacccggcgtggcaaacatcggaacacgcccaacggttgccggtattcgccagcagctggaagtgcatttgttagatgttgcaatggacctttacggtcgccatatacaagtagtgctgcgtaaaaaaatacgcaatgagcagcgatttgcgtcgctggacgaactgaaagcgcagattgcgcgtgatgaattaaccgcccgcgaattttttgggctaacaaaaccggcttaagcctgttatgtaatcaaaccgaaacacggaaccgagaatctgatgagtgactataaatcaaccctgaatttgccggaaacagggttcccgatgcgtggcgatctcgccaagcgcgaaccgggaatgctggcgcgttggactgatgatgatctgtacggcatcatccgtgcggctaaaaaaggcaaaaaaaccttcattctgcatgatggccctccttatgcgaatggcagcattcatattggtcactcggttaacaagattttgaaagacattatcgtgaagtccaaagggctttccggttatgactcgccgtatgtgcctggctgggactgccacggtctgccgatcgagctgaaagtagagcaagaatacggtaagccgggtgagaaattcaccgccgccgagttccgcgccaagtgccgcgaatacgcggcgacccaggttgacggtcaacgcaaagactttatccgtctgggcgtgctgggcgactggtcgcacccgtacctgaccatggacttcaaaactgaagccaacatcatccgcgcgctgggcaaaatcatcggcaacggtcacctgcacaaaggcgcgaagccggtacactggtgcgttgactgccgttctgcgctggcggaagcggaagttgagtattacgacaaaacttctccgtccatcgacgttgcttttcaggcggtcgatcaggatgcactgaaagcaaaatttgccgtaagcaacgttaacggcccaatctcgctggtgatctggaccactacgccgtggactctgcctgcgaaccgcgcaatctctattgcacctgatttcgactatgcgctggtgcagatcgacggtcaggccgtgattctggcgaaagatctggttgaaagcgtaatgcagcgtatcggcgtgaccgattacaccattctcggcacggtaaaaggtgcggagcttgagttgctgcgctttacccatccgtttatgggcttcgacgttccggcaatcctcggcgatcacgttaccctggatgccggtaccggtgccgttcacaccgcgcctggccacggcccggacgactatgtgatcggtcagaaatacggcctggaaaccgctaacccggttggcccggacggcacttatctgccgggcacttatccgacgctggatggcgtgaacgtcttcaaagcgaacgacatcgtcgttgcgctgctgcaggaaaaaggcgcgctgctgcacgttgagaaaatgcagcacagctatccgtgctgctggcgtcacaaaacgccgatcatcttccgcgcgacgccgcagtggttcgtcagcatggatcagaaaggtctgcgtgcgcagtcactgaaagagatcaaaggcgtgcagtggatcccggactggggccaggcgcgtatcgagtcgatggttgctaaccgtcctgactggtgtatctcccgtcagcgcacctggggcgtaccgatgtcactgttcgtgcacaaagacacggaagagctgcatccgcgtactctcgaactaatggaagaagtggcaaaacgcgttgaagttgacggcatccaggcgtggtgggatcttgatgcgaaagagatcctcggcgatgaagctgatcagtacgtgaaagtgccggacacattggatgtatggtttgactccggatctacccactcttctgttgttgacgtgcgtccggaatttgccggtcacgcagcggacatgtatctggaaggttctgaccagcaccgtggttggttcatgtcttccctaatgatctccaccgcgatgaaaggcaaagcgccgtatcgtcaggtactgacccacggctttaccgtggatggtcagggtcgcaagatgtctaaatccatcggcaataccgtttcgccgcaggatgtgatgaacaaactgggcgcggatattctgcgtctgtgggtggcatcaaccgactacaccggtgaaatggccgtttctgacgagatcctgaaacgtgctgccgatagctatcgtcgtatccgtaacaccgcgcgcttcctgctggcaaacctgaacggttttgatccagcaaaagatatggtgaaaccggaagagatggtggtactggatcgctgggccgtaggttgtgcgaaagcggcacaggaagacatcctcaacgcgtacgaagcatacgatttccacgaagtggtacagcgtctgatgcgcttctgctccgttgagatgggttccttctacctcgacatcatcaaagaccgtcagtacaccgccaaagcggacagtgtggcgcgtcgtagctgccagactgcgctgtatcacatcgcagaagcgctggtgcgctggatggcaccaatcctctccttcaccgctgatgaagtgtggggctacctgccgggcgaacgtgaaaaatacgtcttcaccggtgagtggtacgaaggcctgtttggcctggcagacagtgaagcgatgaacgatgcgttctgggacgagctgttgaaagtgcgtggcgaagtgaacaaagtcattgagcaagcgcgtgccgacaagaaagtgggtggctcgctggaagcggcagtaaccttgtatgcagaaccggaactggcggcgaaactgaccgcgctgggcgatgaattacgatttgtcctgttgacctccggcgctaccgttgcagactataacgacgcacctgctgatgctcagcagagcgaagtactcaaagggctgaaagtcgcgttgagtaaagccgaaggtgagaagtgcccacgctgctggcactacacccgggatgtcggcaaggtggcggaacacgcagaaatctgcggccgctgtgtcagcaacgtcgccggtgacggtgaaaaacgtaagtttgcctgatgagtcaatcgatctgttcaacagggctacgctggctgtggctggtggtagtcgtgctgattatcgatctgggcagcaaatacctgatcctccagaactttgctctgggggatacggtcccgctgttcccgtcgcttaatctgcattatgcgcgtaactatggcgcggcgtttagtttccttgccgatagcggcggctggcagcgttggttctttgccggtattgcgattggtattagcgtgatcctggcagtgatgatgtatcgctcgaaggccacgcagaagctaaacaatatcgcttatgcgctgattattggcggcgcgctgggcaacctgttcgaccgcctgtggcacggcttcgttgtcgatatgatcgacttctacgtcggcgactggcacttcgccaccttcaaccttgccgatactgccatttgtgtcggtgcggcgttgatcgtgctggaagggtttttaccttctaaagcgaaaaaacaataataaaccctgccggatgcgatgctgacgcatcttatccggcctacagattgctgcgaaatcgtaggccggataaggcgtttacgccgcatccggcaaaaatcctcaaatataagagcaaacctgcatgtctgaatctgtacagagcaatagcgccgtcctggtgcacttcacgctaaaactcgacgatggcaccaccgccgagtctacccgcaacaacggtaaaccggcgctgttccgcctgggtgatgcttctctttctgaagggctggagcaacacctgttggggctgaaagtgggcgataaaaccaccttctcgttggagccagatgcggcgtttggcgtgccgtcaccggacctgattcagtacttctcccgccgtgaatttatggatgcaggcgagccagaaattggcgcaatcatgctttttaccgcaatggatggcagtgagatgcctggcgtgatccgcgaaattaacggcgactccattaccgttgatttcaaccatccgctggccgggcagaccgttcattttgatattgaagtgctggaaatcgatccggcactggaggcgtaacatgcagatcctgttggccaacccgcgtggtttttgtgccggggtagaccgcgctatcagcattgttgaaaacgcgctggccatttacggcgcaccgatatatgtccgtcacgaagtggtacataaccgctatgtggtcgatagcttgcgtgagcgtggggctatctttattgagcagattagcgaagtaccggacggcgcgatcctgattttctccgcacacggtgtttctcaggcggtacgtaacgaagcaaaaagccgcgatttgacggtgtttgatgccacctgtccgctggtgaccaaagtgcatatggaagtcgcccgcgccagccgtcgtggcgaagagtcgattctcatcggccacgccgggcatccggaagtggaaggtacgatgggccagtacagtaacccggaagggggaatgtatctggtcgaatcgccggacgatgtgtggaaactgacggtcaaaaacgaagagaagctctcctttatgacccagaccacgctgtcggtggatgacacgtctgatgtgatcgacgcgctgcgtaaacgcttcccgaaaattgtcggtccgcgcaaagatgacatctgctacgccacgactaaccgtcaggaagcggtacgcgccctggcagaacaggcggaagttgtgttggtggtcggttcgaaaaactcctccaactccaaccgtctggcggagctggcccagcgtatgggcaaacgcgcgtttttgattgacgatgcgaaagatatccaggaagagtgggtgaaagaggttaaatgcgtcggcgtgactgcgggcgcatcggctccggatattctggtgcaaaatgtggtggcacgtttgcagcagctgggcggtggtgaagccattccgctggaaggccgtgaagaatacattgttttcgaagtgccgaaagagctgcgtgtcgatattcgtgaagtcgattaagtcattagcagcctaagttatgcgaaaatgccggtcttgttaccggcattttttatggagaaaacatgcgtttacctatcttcctcgatactgaccccggcattgacgatgccgtcgccattgccgccgcgatttttgcccccgaactcgacctgcaactgatgaccaccgtcgcgggtaatgtctcggttgagaaaactacccgtaatgccttgcaactgctgcatttctggaatgcggagattccgctcgcccagggagccgctgtgccgctggtacgcgcaccgcgtgatgcggcatctgtgcacggcaaatcgggaatggctggctacgactttgttgagcacaaccgaaagccgctcgaggtaccggcgtttctggcgattcgggatgccctgatgcgtgcaccagagcctgttaccctggtagccatcggcccgttaaccaatattgcgctgttactttcacaatgcccggaatgcaaaccgcatattcgccgtctggtgatcatgggcggttctgctggtcgcggcaactgtacaccaaatgccgagtttaatatcgctgccgatccagaagcggctgcctgtgtcttccgtagcggcatcgaaattgtcatgtgcggtctggatgtcaccaatcaggcaatattaacccctgactatctcgctactttaccggagttgaatcgcaccggaaaaatgctccacgccctgtttagccactaccgtagcggcagtatgcaaagcggtctgcgaatgcacgatctctgcgccatcgcctggctggtgcgcccggacttattcaccctcaagccgtgttttgtcgcggtagaaactcaaggcgaatttacctcaggcacgacggtggttgatatcgacggttgcctgggcaaaccagccaatgtacaggtggcattggatctgaatgtaaaaggcttccaacagtgggtggctgatttgctggctctggtgccgtaacctgtcacatgttatcggcatgcagtcattcatcgactcatgcctttcactgatatccctccctgtttatcattaatttctaattatcagcgtttttggctggcggcgtagcgatgcgctggttactctgaaaacggtctatgcaaattaacaaaagagaatagctatgcatgatgcaaacatccgcgttgccatcgcgggagccggggggcgtatgggccgccagttgattcaggcggcgctggcattagaaggcgtgcagctgggcgcggcgctggagcgcgaaggatcttctttactgggcagcgacgccggtgagctggctggtgcagggaaaacaggcgttaccgtgcaaagcagccttgatgcgataaaagatgattttgatgtgtttatcgattttacccgtccggaaggtacgctgaaccatctcgctttttgtcgccagcatggcaaagggatggtgatcggcactacggggtttgacgaagccggtaaacaggcgattcgtgacgccgccgccgatattgcgattgtctttgccgccaattttagcgttggcgttaacgtcatgcttaagctgctggagaaagcagccaaagtgatgggtgactacaccgatatcgaaattattgaagcacatcatagacataaagttgatgcgccgtcaggcaccgcactggcaatgggagaggcgatcgcccacgcccttgataaagatctgaaagattgcgcggtctacagtcgtgaaggccacaccggtgaacgtgtgcctggcaccattggttttgccaccgtgcgtgcaggtgacatcgttggcgaacataccgcgatgtttgccgatattggcgagcgtctggagatcacccataaggcgtccagccgcatgacatttgctaacggcgcggtaagatcggctttgtggttgagtggtaaggaaagtggtctttttgatatgcgagatgtgcttgatctcaatagtttgtaaccacaaaatatttgttatggtgcaaaaataacacatttaatttattgattgtaaagggctttaatttttggcccttttatttttagtgttatgtttttaaattgtctataagtgccaaaaattacatgttttgtcttcggtttttgttgttttaatgtaaattttgaccatttggtccactttttcctgctcgcttttatttcatgcaatcttcttgctgcgcaagcgttttccagaacaggttatatgatctttttgccgcttaatgcctgtaaaacatgcatgagccacaaaataatataaaaaatcctgccattaagttgacttttagcgcccatatctccagaatgccgccgtttgccagaaattcgtcggtaagcagatttgcattgatttacgtcatcattgtgaattaatatgcaaataaagtgagtgaatattctctggagggtgttttgattaagtcagcgctattggttctggaagacggaacccagtttcacggtcgggccataggggcaacaggttcggcggttggggaagtcgttttcaatacttcaatgaccggttatcaagaaatcctcactgatccttcctattctcgtcaaatcgttactcttacttatccccatattggcaatgtcggcaccaatgacgccgatgaagaatcttctcaggtacatgcacaaggtctggtgattcgcgacctgccgctgattgccagcaacttccgtaataccgaagacctctcttcttacctgaaacgccataacatcgtggcgattgccgatatcgatacccgtaagctgacgcgtttactgcgcgagaaaggcgcacagaatggctgcattatcgcgggcgataacccggatgcggcgctggcgttagaaaaagcccgcgcgttcccaggtctgaatggcatggatctggcaaaagaagtgaccaccgcagaagcctatagctggacacaagggagctggacgttgaccggtggcctgccagaagcgaaaaaagaagacgagctgccgttccacgtcgtggcttatgattttggtgccaagcgcaacatcctgcggatgctggtggatagaggctgtcgcctgaccatcgttccggcgcaaacttctgcggaagatgtgctgaaaatgaatccagacggcatcttcctctccaacggtcctggcgacccggccccgtgcgattacgccattaccgccatccagaaattcctcgaaaccgatattccggtattcggcatctgtctcggtcatcagctgctggcgctggcgagcggtgcgaagactgtcaaaatgaaatttggtcaccacggcggcaaccatccggttaaagatgtggagaaaaacgtggtaatgatcaccgcccagaaccacggttttgcggtggacgaagcaatattacctgcaaacctgcgtgtcacgcataaatccctgttcgacggtacgttacagggcattcatcgcaccgataaaccggcattcagcttccaggggcaccctgaagccagccctggtccacacgacgccgcgccgttgttcgaccactttatcgagttaattgagcagtaccgtaaaaccgctaagtaatcaggagtaaaagagccatgccaaaacgtacagatataaaaagtatcctgattctgggtgcgggcccgattgttatcggtcaggcgtgtgagtttgactactctggcgcgcaagcgtgtaaagccctgcgtgaagagggttaccgcgtcattctggtgaactccaacccggcgaccatcatgaccgacccggaaatggctgatgcaacctacatcgagccgattcactgggaagttgtacgcaagattattgaaaaagagcgcccggacgcggtgctgccaacgatgggcggtcagacggcgctgaactgcgcgctggagctggaacgtcagggcgtgttggaagagttcggtgtcaccatgattggtgccactgccgatgcgattgataaagcagaagaccgccgtcgtttcgacgtagcgatgaagaaaattggtctggaaaccgcgcgttccggtatcgcacacacgatggaagaagcgctggcggttgccgctgacgtgggcttcccgtgcattattcgcccatcctttaccatgggcggtagcggcggcggtatcgcttataaccgtgaagagtttgaagaaatttgcgcccgcggtctggatctctctccgaccaaagagttgctgattgatgagtcgctgatcggctggaaagagtacgagatggaagtggtgcgtgataaaaacgacaactgcatcatcgtctgctctatcgaaaacttcgatgcgatgggcatccacaccggtgactccatcactgtcgcgccagcccaaacgctgaccgacaaagaatatcaaatcatgcgtaacgcctcgatggcggtgctgcgtgaaatcggcgttgaaaccggtggttccaacgttcagtttgcggtgaacccgaaaaacggtcgtctgattgttatcgaaatgaacccacgcgtgtcccgttcttcggcgctggcgtcgaaagcgaccggtttcccgattgctaaagtggcggcgaaactggcggtgggttacaccctcgacgaactgatgaacgacatcactggcggacgtactccggcctccttcgagccgtccatcgactatgtggttactaaaattcctcgcttcaacttcgaaaaattcgccggtgctaacgaccgtctgaccactcagatgaaatcggttggcgaagtgatggcgattggtcgcacgcagcaggaatccctgcaaaaagcgctgcgcggcctggaagtcggtgcgactggattcgacccgaaagtgagcctggatgacccggaagcgttaaccaaaatccgtcgcgaactgaaagacgcaggcgcagatcgtatctggtacatcgccgatgcgttccgtgcgggcctgtctgtggacggcgtcttcaacctgaccaatattgaccgctggttcctggtacagattgaagaactggtgcgtctggaagagaaagtagcggaagtgggcatcactggcctgaacgctgaattcctgcgccagctgaaacgcaaaggctttgccgatgcgcgtctggcaaaactggcgggcgtgcgcgaagcggaaatccgcaagctgcgcgaccagtatgacctgcacccggtttataagcgcgtggatacctgtgcggcagagttcgccaccgacaccgcttacatgtactccacttatgaagaagagtgcgaagcgaatccgtctaccgaccgtgaaaaaatcatggttctcggcggcggcccgaaccgtatcggtcagggtatcgaattcgactactgctgtgtacacgcctcgctggcgctgcgcgaagacggttacgaaaccattatggttaactgtaacccggaaaccgtctccaccgactacgacacttccgaccgcctctacttcgagccggtaaccctggaagatgtgctggaaatcgtgcgtattgagaagccgaaaggcgttatcgttcagtacggcggtcagaccccgctgaaactggcgcgtgcactggaagccgctggcgtaccggttatcggcaccagcccggatgctatcgaccgtgcggaagaccgtgaacgcttccagcacgcggttgaccgcctgaaactgaagcaaccggcgaacgccaccgttaccgctatcgaaatggcggtagagaaggcgaaagagattggctacccgctggtggtacgtccgtcttacgttctcggcggtcgggcgatggaaatcgtctatgacgaagcagacctgcgtcgctacttccagacggcggtcagcgtgtctaacgatgcgccagtgttgctggaccacttcctcgatgacgcggtagaagtggatgtggacgccatctgcgacggcgaaatggtgctgattggcggcatcatggagcatattgagcaggcgggcgtgcactccggtgactccgcatgttcgctgccagcctacactttaagtcaggaaattcaggatgtgatgcgccagcaggtgcagaaactggccttcgaattgcaggtgcgcggcctgatgaacgtgcagtttgcggtgaaaaacaacgaagtctacctgattgaagttaacccgcgtgcggcgcgtaccgttccgttcgtctccaaagccaccggcgtaccgctggcaaaagtggcggcgcgcgtgatggctggcaaatcgctggctgagcagggcgtaaccaaagaagttatcccgccgtactactcggtgaaagaagtggtgctgccgttcaataaattcccgggcgttgacccgctgttagggccagaaatgcgctctaccggggaagtcatgggcgtgggccgcaccttcgctgaagcgtttgccaaagcgcagctgggcagcaactccaccatgaagaaacacggtcgtgcgctgctttccgtgcgcgaaggcgataaagaacgcgtggtggacctggcggcaaaactgctgaaacagggcttcgagctggatgcgacccacggcacggcgattgtgctgggcgaagcaggtatcaacccgcgtctggtaaacaaggtgcatgaaggccgtccgcacattcaggaccgtatcaagaatggcgaatatacctacatcatcaacaccacctcaggccgtcgtgcgattgaagactcccgcgtgattcgtcgcagtgcgctgcaatataaagtgcattacgacaccaccctgaacggcggctttgccaccgcgatggcgctgaatgccgatgcgactgaaaaagtaatttcggtgcaggaaatgcacgcacagatcaaataatagcgtgtcatggcagatatttttcatccgctaatttgatcgaataactaatacggttctctgatgaggaccgtttttttttgcccattaagtaaatcttttggggaatcgatatttttgatgacataagcaggatttagctcacacttatcgacggtgaagttgcatactatcgatatatccacaattttaatatggccttgtttaattgcttcaaaacgagtcatagccagacttttaatttgtgaaactggagttcgtatgtgtgaaggatatgttgaaaaaccactctacttgttaatcgccgaatggatgatggctgaaaatcggtgggtgatagcaagagagatctctattcatttcgatattgaacacagcaaggcggttaataccctgacttatattctgtcggaagtcacagaaataagctgcgaagttaagatgatccctaataagctggaagggcggggatgccagtgtcagcgactggttaaagtggtcgatatcgatgaacaaatttacgcgcgcctgcgcaataacagtcgggaaaaattagtcggcgtaagaaagacaccgcgtattcctgccgttccgctcacggaacttaaccgcgagcagaagtggcagatgatgttgtcaaagagtatgcgtcgttaatgtcatttcgatgataccgtgcgacctggtcgccggatgcgatgctggcgcatcttatccggcttacggttgctctccagccgggttggataaggcgtttatgccgcatccgacagctatcgccggatgcgatgctggcgcatcttatccggcctacggttgctctccagcagagttggataaggcgtttacgccgcatccggcaagatcaccgtttaggcgtcacatccgttgtcccctgcaaacgggggcgattttcctccatttgcctcaacggctgcgtttcatgtaacgatgcatgatagcgcccgacaagatcctgatactctttggtattcaaccgtttccagtgtaactcgtcgtcactaacactgcgtacagcgcgggctggcgtacccatcaacaactggcgtttctcgccgctaaagcccgctttgacaaagctcatggcggcaacaatgctctcttcgccaatgaccgcgccatccataatcacgctgttcatcccgaccaatgcatcgcgaccaatcacacaaccatgcaggatcgctccgtgcccgatatggccgttttccccaacaatggtgtcagtgtcgcagtagccatgcataatgcagccatcctgaatattggctcccgcttgcacgatcaaccgcccgtagtcaccacgcagtgaggcgagtgggccgatgtagacaccggctcccacaatcacatcgccaatcaagacggcactgggatggacaaacgccgtcgggtgaaccaccggaattaacccctcaaaggcgtaatagctcacggttgttaacgtcctttccacaccggatcgcgcttctcggcaaacgccagcggcccttcaatggcatcctccgaatgcagaaccgacggatagtgtttcaacacgccgctgcgaatatagcgatacgcttcttctaccggcatttcgctggtggtgcggtagatctctttcagcgccgcaatcgccagcggagcgctgttaaccagctgctgcgccagttcgcgggcgttatccatcagttccgcctggctaaccacgcggttgactatcccccaacgcagcgcctcttctgcgcccattcgtctgccggtcatcaccatttcattgacgatggcaggcggcaggatcttcggcagacgcagcacaccgccgctgtcaggaacgatgcccagtttggcttccggcagggcgaagctggcgttatcggcacaaacaataaaatctgccgccagcgccagttcgaaaccgccgccaaaggcgtagccgttcacagctgcgataactggtttgtcgagattgaaaatttcggttaatcccgcaaaaccacccgggccaaagtcagcatccggtgcttcgccttctgctgccgcttttaaatcccagcccgcggaaaagaatttctctccggcaccggtaataatggcgacacgtaattgcggatcgtcacggaaatttagaaatacttcgcccatttcaaagctggtttttgcatcaatagcattcgcttttgggcgatcaagggtaatttccagaattgatccattgcgggtcagatgtaatgattcactcattccttttctccatttttgctttttcagggacgacaacattcctgcaaaaaatgcatattgttttagagcgtgattattagctggcagggtagttccctgccgtttcatttatttcagattctttctaattattttccccgagcaattacgtggcagatcttttctgatctccagataagagggcactttaaatttcgccatattttgttcgcagaagcgaaaaaattcctcttcgctcaatgtttcaccttcattcagcaccacaaatgctttgatggcttcatcgcgaatcgaatctttaatacccacaaccacgatgtcctgaattttcggatgggtggcgatgatattttccagctccacgcaggagacattctcgccaccgcgtttgatcatattgcagcggcgatcgacgaaataaaaaaagccttcttcgtcgcggtatccggtatcgccggtatgcagccagccatcagcttccagcactttcgcagtggctttcgggttgagaaaatactctttgaagatggttttccctggtacgcctttaatacagatttcaccgatctcacctgccgggagcgggcaattgtgatcgtcgcggatctccgcttcgtagcaaaaccccgctcgaccaatcgacggccagcgtcgtttatcgccagggcgatcgccgataatgcccacaatggtttccgtcatcccataagacgtcagcaagcgaacgccgaagcgttcacaaaacgcatctttttcctgctccgacaagttgagataaaacatcacttcccgcaggcggtgttgccgatcgttcgctgaaggcggctgcaccatcaaggtacggatcatcatcggaatacattcggtaacggtggcgcggtacttctgtacctgtccccagaaggcgcgggcgctgtatttctcgaccagcacaaaggtggccccggcagaaaacgccgccatcgccgcagtacactggcaatcgatatgaaacgcaggcattaccgtcaggtagacgtcatcgtcacgcagtgcacactgccaggcggagtaatatccagcgaagcgcaggttgtaatgggtaatcaccacacctttcggtcgggaggtggtgccggaggtgaagagaatttccgccgtatcgtcagtcgatagcggcggtgcatagcacaaggtggcaggttgttgatttttcagttgagtaaacgaactcacgccatcatcagcgggaagtgccacatctgtcaggcaaatgtgccgcaattgagtggcatcttcctgctgaatctgttgatacataggatagaattgcgcactggttaccagcaggcacgcctggctattttgcaggatccacgcgctttcctcgcgtaacaggcgggcgttaatcggcaccataatcgcgccaatttttgccagcccgaaccagcaaaagataaattccgggcagttgtcgagatgtagtgcaaccttgtcgcctttgcgaatccccagcgtataaaacaggtttgccgtgcggttaatctcctgatttaactcaagataactataccggttaacgactccgccgctggattcacaaatcagcgccgttttatgaccgtaaacgtccgcaagatcgtcccacatttgacgtagatgttgtccgccaatgatatccattgcacctctatccatttttgttcgtttgttattgggcgggcgctagtcaggcaagccgactgacgccacgcgtttagtcctcaactttggccagacctttgctgaccaactcctgaatgtcgttttcgctgtagccgatatttttcaaaatggcagccgtgtccatgccatgtgagggcattccgcgccagatttgtccggggttatttttgaatttcggcatgatgttcggccctttgcaggtgcgaccatccatcgtttgccactgagtgattgattcgcgagccacatactgtggattgctttccagttccggtacggtcagcactttggcgcaggcgatattcagttcagcaaagcgttcttttacttccgcgatggtatgtgtcgccagccaggcatcgagtttctcttcaaccagtgggccgtaagggcattcgatacggtggataagctgagtgccttccgggatttctggcgtgccaagcagatgtgcgaggccaatatctttaaagcactcttcaatttgggtaatgcccaccagttccatcacgatgtagccgtcggcacatttatacagaccgcaaccggcgtagtagggatctttacctttgctcatgcgcgggcacatttcgccgccgttgaagtaatccatcatgaagtactggcccatacgcagcatcacttcatacatggcgatgtcgatactttcgcctttaccggtttcacgcgctttatgcagtgctgccagcgccgccgtggtggcggtcaggccagaaaagtaatcggcggtatacgggaaggcaggcattggctggtcaacatcaccgttctgaatcaggtaaccactgaaggcctgggcgatggtgttataggccggaagattggtgtactcctcggtgccgtactgaccaaaaccggacaggtgagcgataaccagtttcgggttgtgctgccacagtacttcatcggtaatgccacgacgggcaaaggccggacctttactggcttcgatgaagatatcggtggtttccattaatttcagaaacgcttcgcggccttcatctttgaaaatatttaacgacagcgcgtgcaaattgcggcgggagagttgcgggtagttcggttgaacgcgaatggtgtcggcccaggcgacgttctcgatccagataacttccgcgccccattctgcgaacatttgcccggcaaacggtccggcgatttcgataccggagaagacaacgcgcaatccggccaacggcccgaatttcggcatgggtagatgatccattatttgctcctgaaaaatttatgtagcgcatgactgccggatgcggcgtaaacgccttatccggcctacattcgtgctcccgtaggcctgataagacgcgtcagcgtcgcatcaggcagcgcacggacttagcggtattgcttcagcaccgcacgacccagcgtcaggatctgcatttcgtcagatcctccggaaacgcggtctacacgcaggtcacgccagaagcggctgatgcggtggttgcccgcaatcccgacaccgcccagcacctgcattgcgctatccaccacttcaaatgccgcattggcgcagaagtatttgcacatcgctgcatcgccagaggtgatggtgccgttgtctgctttccacgctgcttcatacagcatgtttttcatggagtttaatttgatcgccatgtgggcgaatttttcctgaatcaactggaaacgaccaatagcctcgccaaactgcacgcgctggttggcgtagcgcgccgcatcttcaaaggcgcacatcgccgtaccgtagttggtcagggctaccaggaaacgttcatggtcgaactcttctttgacgcggttaaagccgttaccttcccgaccgaacatgtctttctcgtccagttccacatcgtcaaaggtgatttcacagcagctatccatacgcagaccgagcttctcaagtttggtcactttgatgcccggtttgctcatatcaacaaaccattcggtgtagacaggtttgtccggagaagccccgtcgcgcgccatcaccacgatgtacggggtgtaggcgctactggtaataaaacacttactaccattaagataaatcttaccatttctacgggtataagtcgttttcaggctacccacgtcggagcccgcgcccggttcggtaatcgctgagttccacatctgcttaccggtgccgcggaaagccataatcttgtcgatctgctcttgtgtgccttcgcgcaggaaggtattgaacccgcccggcaactggtacagtacataggttggtgcccccagacgtcccagctccatccacacggcggcgagagtaacaaaccccgcgtccagaccaccgtgctcttcagggatcagcagactgtcgatacccatatccgccagtgctttgacaaaacgttccgggtagacgctgtcacggtcgcactcggcaaaataggcctcccagttttcgctggccatcagttcgcggataccggcgacaaacagttcctgctcatcatttaaattaaaatccatctttcaacctcttgatattttgggggttaattaatctttccagttctgtttcgcgtctttaataaaggagagcgtcaccataatgttgacgaagaacagcgggcatcctccggcgataatggcggtttgaatcggtttcaggccgccgagcgccagcagaacaataccgataatgccaaccagaattgaccagccgatacgcaccagcagcggtggttcttcaccatcgcgtacttcgcggcaagtggacatcgccagggtataagagcaggcgttaaccagcgtaacggtggcaataaagcagaggatgaagaagccccacatggtggcggtgctgagtggcagagcggcccaggtttcaatgatggcgcgcgccacaccgtactgttcgatcagatttggaatgttgatgatgtttttatctatcaacagcagagtgttactaccgagtacagtccacaggatccaggttgacgctgtcagccccagcaccatgccgaagcacagttcacgcacagtacgaccacgggagatgcgggcgaggaagatactcatctggatagcataaatcacccaccatgcccagtagaacacggtccagccctgcgggaagccgcctttagcgatgggatcggtatagaacaacatgcgcggcagatacatcagcaacatccccaccgaatcggtgaagtagttcatgatgaagctggcaccgctgacaatgaacacccaacccagcatcaggaagctcaggtaactacgcacgtcactggcgatacgtacccctttttgcagaccgcaagcgacgcaaatggcgttgaggataatccagcaggtaatgatgatagcgtccagttgcagggtatgcggaatgccaaacaaccattgcatacactcggtcaccagcggcgtggcaaggcccagactggtacccatcgcgaagatcaaggcgacgagatagaagttgtcgacgatagtgccgaacaaccctttggcgtgtttttcacctaccagcggcaccagtgtcgagctggggcgaatcacttccattttgcggacaaagaagaagtaagcgaaggcgactgaaaggaagctgtaagtggcccacggcagaggtccccagtggaacaagctgtaagccagccccaactctttcgcccctgtcgagttcggttctaagccaaacggcggggtggagatgtagtagtagatctcaatcgatccccagaacagtacggcagcagacgtacaggaggcgaacatcataaagatccaactggcggtgctaaattctggcggttcgttacctaaacgctttttggcatacgggccaaacaccagccagaaccaaccgaaaagcatcaccaccatataccattcaaatgcccatccccatacattggtgacgtaactgaatacagcattaataacgacattcgctgcatccagatctctgactgtaagccaacaaagtatgccgacgattattaacggcggaaagaaaaccttcggttctattcccgtttttctcttttcattcttcatgagttaattccactgtgaaaacgaatatttattttgcgttcccgtttgttttatttttgttaacatttaatataattattattaacctcgtggacgcgttaatggctaactcataatgggtattcaataagctgtattctgtgattggtatcacatttttgtttcgggtgaatagagggcgttttttcgttaattttgattaataatcagtttgttatgctctattgtgagtaaaaaaataacatctgactttcaatattggtgatccataaaacaatattgaaaatttctttttgctacgccgtgttttcaatattggtgaggaacttaacaatattgaaagttggatttatctgcgtgtgacattttcaatattggtgattaaagttttatttccaaattaaagggcgtgatatctgtaattaacaccaccgatatgaacgacgtttccttcatgatttctggagatgcaatgaagattattacttgctataagtgcgtgcctgatgaacaggatattgcggtcaataatgctgatggttcattagacttcagcaaagccgatgccaaaataagccaatacgatctcaacgctattgaagcggcttgccagctaaagcaacaggcagcagaggcgcaggtgacagccttaagtgtgggcggtaaagccctgaccaacgccaaagggcgtaaagatgtgttatcgcgcggcccggatgaactgattgtggtaattgatgaccagttcgagcaggcactgccgcaacaaacggcgagcgcactggctgcagccgcccagaaagcaggctttgatttgatcctctgtggcgatggttcttccgacctttatgcccagcaggttggtttgctggtaggcgaaatcctcaatattccggcagttaacggcgtcagcaaaattatctccctgactgcagataccctcaccgttgagcgcgaactggaagatgaaaccgaaaccttaagcattccgctgcctgcggttgttgctgtttccactgatatcaattccccacaaattccttcgatgaaagccattctcggcgcggcgaaaaagcccgtccaggtatggtcggcggcggatattggttttaacgcagaggcagcctggtcagaacaacaggttgccgcgccgaaacagcgcgaacgtcagcgcatcgtgattgaaggcgacggcgaagaacagatcgccgcatttgctgaaaatcttcgcaaagtcatttaattacaggggatgctatgaacacgttttctcaagtctgggtattcagcgataccccttctcgtctgccggaactgatgaacggtgcgcaggctttagctaatcaaatcaacacctttgtcctcaatgatgccgacggcgcacaggcaatccagctcggcgctaatcatgtctggaaattaaacggcaaaccggacgatcggatgatcgaagattacgccggtgtcatggctgacactattcgccagcacggcgcagacggcctggtgctgctgccaaacacccgtcgcggcaaattactggcggcaaaactgggttatcgccttaaagcggcggtgtctaacgatgccagcaccgtcagcgtacaggacggtaaagcgacagtgaaacacatggtttacggtggtctggcgattggcgaagaacgcattgccacgccgtatgcggtactgaccatcagcagcggcacgttcgatgcggctcagccagacgcgtcacgcactggcgaaacgcacaccgtggagtggcaggctccggctgtggcgattacccgcacggcaacccaggcgcgccagagcaacagcgtcgatctcgacaaagcccgtctggtggtcagcgtcggtcgcggtattggcagcaaagagaacattgcgctggcagaacagctttgcaaggcgataggtgcggagttggcctgttctcgtccggtggcggaaaacgaaaaatggatggagcacgaacgctatgtcggtatctccaacctgatgctgaaacctgaactgtacttggcggtggggatctccgggcagatccagcacatggttggcgctaacgcgtcgcaaaccattttcgccatcaataaagataaaaatgcgccgatcttccagtacgcggattacggcattgttggcgacgccgtgaagatccttccggcgctgaccgcagctttagcgcgttgatccactctggcagggctgcattttggccctgccgctgacagggagctcttatgtccgaagatatctttgacgccatcatcgtcggtgcagggcttgccggttcggttgccgcactggtgctcgcccgcgaaggtgcgcaagtgttagttatcgagcgtggcaattccgcaggtgccaagaacgtcaccggcgggcgtctctatgcccacagtctggaacacattattcctggtttcgccgactccgcccccgtagaacgcctgatcacccatgaaaaactcgcgtttatgacggaaaagtcagcgatgactatggactactgcaatggtgacgaaacctcgccatcccagcgttcttactccgttttgcgcagtaaatttgatgcctggctgatggagcaggccgaagaagcgggcgcgcagttaattaccgggatccgcgtcgataacctcgtacagcacgatggcaaagtcgtcggtgtagaagccgatggcgatgtgattgaagcgaaaacggtgatccttgctgatggggtgaactccatccttgccgaaaaattggggatggcaaaacgcgtcaaaccgacggatgtggcggttggcgtgaaggaactgatcgagttaccgaagtcggttattgaagaccgttttcagttgcagggtaatcagggggcggcttgcctgtttgcgggatcacccaccgatggcctgatgggcggcggcttcctttataccaatgaaaacaccctgtcgctggggctggtttgtggtttgcatcatctgcatgacgcgaaaaaatcggtgccgcaaatgctggaagatttcaaacagcatccggccgttgcaccgctgatcgcgggcggcaagctggtggaatattccgctcacgtagtgccggaagcaggcatcaacatgctgccggagttggttggtgacggcgtattgattgccggtgatgccgccggaatgtgtatgaacctcggttttaccattcgcggtatggatctggcgattgccgccggggaagccgcagcaaaaaccgtgctttcagcgatgaaaagcgacgatttcagtaagcaaaaactggcggaatatcgtcagcatcttgagagtggtccgctgcgcgatatgcgtatgtaccagaaactaccggcgttccttgataacccacgcatgtttagcggctacccggagctggcggtgggtgtggcgcgtgacctgttcaccattgatggcagcgcgccggaactgatgcgcaagaaaatcctccgccacggcaagaaagtgggcttcatcaatctaatcaaggatggcatgaaaggagtgaccgttttatgacttctcccgtcaatgtggacgtcaaactgggcgtcaataaattcaatgtcgatgaagagcatccgcacattgttgtgaaggccgatgctgataaacaggcgctggagctgctggtgaaagcgtgccccgcaggtctgtacaagaagcaggatgacggcagtgtgcgcttcgattacgccggatgtctggagtgcggcacctgtcgcattctggggctggggtcggcgctggaacagtgggaatacccgcgcggcacctttggtgtggagttccgttacggctgatgttggtttgatacgtaacgccgcactgactctcattgcaaaaaacaggaataaccatgcaaccgtccagaaactttgacgatctcaaattctcctctattcaccgccgcattttgctgtggggaagcggtggtccgtttctggatggttatgtactggtaatgattggcgtggcgctggagcaactgacgccggcgctgaaactggacgctgactggattggcttgctgggcgcgggaacgctcgccgggctgttcgttggcacatcgctgtttggttatatttccgataaagtcggacggcgcaaaatgttcctcattgatatcatcgccatcggcgtgatatcggtggcgacgatgtttgtttcatcccccgtcgaactgttggtgatgcgggtacttatcggcattgtcatcggtgcagattatcccatcgccacctcaatgatcaccgagttctccagtacccgtcagcgggcgttttccatcagctttattgccgcgatgtggtatgtcggcgcgacctgtgccgatctggtcggctactggctttatgatgtggaaggcggctggcgctggatgctgggtagcgcggcgatcccctgtttgttgattttgattggtcgattcgaactgcctgaatctccccgctggttattacgcaaagggcgagtaaaagagtgcgaagagatgatgatcaaactgtttggcgaaccggtggctttcgatgaagagcagccgcagcaaacccgttttcgcgatctgtttaatcgccgccattttccttttgttctgtttgttgccgccatctggacctgccaggtgatcccaatgttcgccatttacacctttggcccgcaaatcgttggtttgttgggattgggggttggcaaaaacgcggcactagggaatgtggtgattagcctgttctttatgctcggctgtattccgccgatgctgtggttaaacactgccggacggcgtccattgttgattggcagctttgccatgatgacgctggcgctggcggttttggggctaatcccggatatggggatctggctggtagtgatggcctttgcggtgtatgcctttttctctggcgggccgggtaatttgcagtggctctatcctaatgaactcttcccgacagatatccgcgcctctgccgtgggcgtgattatgtccttaagtcgtattggcaccattgtttcgacctgggcactaccgatctttatcaataattacggtatcagtaacacgatgctaatgggggcgggtatctcgctgtttggcttgttgatttccgtagcgtttgccccggagactcgagggatgtcactggcgcagaccagcaatatgacgatccgcgggcagagaatggggtaaattgttcagatttctctcttttctgaatcaatattattgactataagccgcgtgaatatatgactacactttgtgggaaaacaaaggcgtaatcacgcgggctacctatgattcttataatttatgcgcatccgtatccgcatcattcccatgcgaataaacggatgcttgaacaggcaaggacgctggaaggcgtcgaaattcgctctctttatcaactctatcctgacttcaatatcgatattgccgccgagcaggaggcgctgtctcgcgccgatctgatcgtctggcagcatccgatgcagtggtacagcattcctccgctcctcaaactttggatcgataaagttttctcccacggctgggcttacggtcatggcggcacggcgctgcatggcaaacatttgctgtgggcggtgacgaccggcggcggggaaagccattttgaaattggtgcgcatccgggctttgatgtgctgtcgcagccgctacaggcgacggcaatctactgcgggctgaactggctgccaccgtttgccatgcactgcacctttatttgtgacgacgaaaccctcgaagggcaggcgcgtcactataagcaacgtctgctggaatggcaggaggcccatcatggatagccatacgctgattcaggcgctgatttatctcggttcggcagcgctgattgtacccattgcggtacgtcttggtctgggatcggtacttggctacctgatcgccggctgcattattggcccgtgggggctgcgactggtgaccgatgccgaatctattctgcactttgccgagattggggtggtgctgatgctgtttattatcggcctcgaactcgatccacaaaggctgtggaagctgcgtgcggcagtgttcggctgtggcgcattgcagatggtgatttgcggcggcctgctggggctgttctgcatgttacttgggctgcgctggcaggtcgcggaattgatcggcatgacgctggcgctctcctctacggcgattgccatgcaggcgatgaatgaacgcaatctgatggtgacgcaaatgggtcgcagtgcctttgcggtgctgctgttccaggatatcgcggcgatcccgctggtggcgatgattccgctactggcaacgagcagtgcctcgacgacgatgggcgcatttgctctctcggcgttaaaagtggcgggtgcgctggtgctggtggtattgctggggcgctatgtcacgcgtccggcgctgcgttttgtagcccgctctggcttgcgggaagtgtttagtgccgtggcgttattcctcgtgtttggctttggtttgctgctggaagaggtcggcttgtcgatggcgatgggcgcgtttctggcgggcgtactgctggcaagctcggaataccgtcatgcgctggagagcgatatcgaaccatttaaaggtttgctgttggggctgtttttcatcggtgttggcatgtcgatagactttggcacgctgcttgaaaacccattgcgcattgtcattttgctgctcggtttcctcatcatcaaaatcgccatgctgtggctgattgcccgaccgttgcaagtgccaaataaacagcgtcgttggtttgcggtgttgttagggcagggcagtgagtttgcctttgtggtatttggcgcggcgcagatggcgaatgtgctggagccggagtgggcgaaatcgctgaccctggcggtggcgctgtcgatggcagcaacgccgattctgctggtgatcctcaatcgccttgagcaatcttctactgaggaagcgcgtgaagccgatgagatcgacgaagaacagccgcgcgtgattatcgccggattcggtcgttttgggcagattaccggacgtttactgctctccagcggggtgaaaatggtggtactcgatcacgatccggaccatatcgaaaccttgcgtaaatttggtatgaaagtgttttatggcgatgccacgcggatggatttactggaatctgccggagcggcgaaagcggaagtgctgattaacgccatcgacgatccgcaaaccaacctgcaactgacagagatggtgaaagaacatttcccgcatttgcagattattgcccgcgcccgcgatgtcgaccactacattcgtttgcgtcaggcaggcgttgaaaagccggagcgtgaaaccttcgaaggtgcgctgaaaaccgggcgtctggcactggaaagtttaggtctggggccgtatgaagcgcgagaacgtgccgatgtgttccgccgctttaatattcagatggtggaagagatggcaatggttgagaacgacaccaaagcccgcgcggcggtctataaacgcaccagcgcgatgttaagtgagatcattaccgaggaccgcgaacatctgtcattaattcaacgacatggctggcagggaaccgaagaaggtaaacataccggcaacatggcggatgaaccggaaacgaaaccctcatcctaataaagagtgacgtaaatcacactttacagctaactgtttgtttttgtttcattgtaatgcggcgagtccagggagagagcgtggactcgccagcagaatataaaattttcctcaacatcatcctcgcaccagtcgacgacggtttacgctttacgtatagtggcgacaattttttttatcgggaaatctcaatgatcagtctgattgcggcgttagcggtagatcgcgttatcggcatggaaaacgccatgctgtggaacctgcctgccgatctcgcctggtttaaacgcaacaccttaaataaacccgtgattatgggccgccatacctgggaatcaatcggtcgtccgttgccaggacgcaaaaatattatcctcagcagtcaaccgggtacggacgatcgcgtaacgtgggtgaagtcggtggatgaagccatcgcggcgtgtggtgacgtaccagaaatcatggtgattggcggcggtcgcgtttatgaacagttcttgccaaaagcgcaaaaactgtatctgacgcatatcgacgcagaagtggaaggcgacacccatttcccggattacgagccggatgactgggaatcggtattcagcgaattccacgatgctgatgcgcagaactctcacagctattgctttgagattctggagcggcggtaattttgtatagaatttacggctagcgccggatgcgacgccggtcgcgtcttatccggccttcctatatcaggctgtgtttaagacgccgccgcttcgcccaaatccttatgccggttcgacggctggacaaaatactgtttatcttcccagcgcaggcaggttaatgtaccaccccagcagcagccggtatccagcgcgtatataccttccggcgtacctttgccctccagcgatgcccagtgaccaaaggcgatgctgtattcttcagcgacagggccaggaatcgcaaaccacggtttcagtggggcaggggcctcttccggcgattctttgctgtacatatccagttgaccgttcgggaagcaaaaacgcatacgggtaaaagcgttggtgataaaacgcagtcttcccagcccccgcaattccggtgaccagttatttggcatatcgccgtacatggcatcaagaaagaagggataggagtcactcgatagcaccgcttctacatcgcgtgcgcactctttggcggtctgcagatcccactgcggcgtgatccctgcgtgggccatcaccagctttttctcttcgtcgatttgcagcagaggctggcgccgcagccagttaagcagctcgtcggcatccggcgcttccagcagcggtgtcaggcgatctttcggtttattgcggctgatcccggcaaataccgccagcagatgcagatcgtgattgcccagcaccagacgtacgctgtcgcctaaggatttcacatagcgcagaacatccagcgaacccggcccgcgcgcgaccagatcgcccgtcagccagagggtatctttcccaggggtaaattctactttatgcagcaatgcgatcagttcatcgtaacaaccatgaacgtcgccaataaggtatgtcgccatattcttttaatgaatgagtgtgggaacggcgagtcggaatacgggaatgtcgatgctgaaagggacgccattttcatcgatcatttcgtagtgaccctgcatggtgcccagcggggtttcaatgattgcaccgctggtgtactggtactcttcgccaggcgcgataagtggctggacgccaaccactccttcgccctggacttcggtttcacggccattgccattggtgatcagccagtaacgccccaacaactgcactggcgctcgccccagattgcgtatggttacggtataagcaaaaacgtaacgttcattatcaggtgaagattgagcctcaatgtagacgctttgaacctgaatacacactcggggcgaattgatcatcgttaactctcctgcaaaggcgcgttctccgccagatagttcgccatctggcaatattgcgcgacagagatattttccgctcgcatcgccgggtcgatccccattcccgttaacacctcgacgctaaacaggttgccgaggctgttacgaatggttttacgacgctggttaaaggcttcggtggtgatgcggctcaacacacgaacatctttaaccgggtgaggcatcgttgcatgaggaaccaggcgcacgacggcggaatccactttgggtggtggtgtaaaggctgacggcggtacttccagtaccgggatcacattgcaatagtattgcgccatgacgcttaatcgaccatacgctttgctgttcggtcctgcaaccagacgattcaccacctctttttgcaacataaagtgcatgtcggcaatggcatcagtatagctaaacagatggaacatcaacggcgtggagatgttataaggcaggttgccgaaaacacgcagcggctgacccattttctcggccagttcaccaaagttaaaggtcatcgcatcctgctgataaatcgtcagtttcgggcctaagaatggatgcgtttgcagacgtgccgccagatcgcggtcaagttcgatgaccgtcagctggtccagacgttcgccgaccggttcggtcaatgccgccagaccggggccgatttcgaccatcgcctggcccttttgcgggttaatggcagacacaatactgtcgatcacgaactgatcgttgagaaagttttgcccgaagcgtttacgggctaagtggccctggtggactcgattattcattgggtgttaacaatcattttgatggcgagattaagcgccgtaataaaactgccgacatcggctttgccacgtcccgccagttcaagcgcggtgccgtggtccactgatgtgcgaataaagggcaggcccagcgtaatgttcacaccgcgcccgaagccctggtattttagcacgggaagaccctgatcgtggtacatcgccagcacggcgtcggcgttatcaagatatttcggctgaaacagggtatcggcaggcagcggcccgttgagtttcatcccctgcgcccgcagctcattgagcaccggaataatggtgtctatctcttccgtacccatatgaccgccttcgcccgcgtgcggattcagcccgcagaccagaatgcgcggttcggcaataccaaatttggtccgcaaatcgtgatgcaaaatagcaatcacttcgtgcaaaagtgcaggggtgatagcgtctgcgatatcgcgcagcggtaaatgcgtcgttgccagcgccacgcgaagttcttcggtcgccagcatcatcaccacctttttcgcctgcgaacgctcttcgaaaaactcggtatgaccggtaaaaggaatgccagcgtcgttaataacgcctttatgcaccggacctgtgatcagcgcggcaaattcgccgttcagacaaccatcgcacgctcgcgccagcgtttccaccacataatgcccattttcaaccgctaactgccccgcagtgacaggtgcacgtagcgcgacaggaagtagcgttaatgtgcccgcagtttgcggttgtgcaggggagttgggggaataagggcggagggtgagcggcaaaccgagcatcgctgcccggttggtaaggagagtggcatcggcacaaacaaccagttcgaccggccactcacgctgtgcaagctggacaactaagtccgggccaatcccggcgggctcgccgggagtgatcacaacacgttgggttttaaccattagttgctcaggattttaacgtaggcgctggcacgttgttcctgcatccagcttgctgcttcttccgagaacttacggttcatcagcatgcggtatgcacgatctttctgcgcagcgtcggttttatcgacattacgggtatccagcagttcgattaaatgccagccgaatgaagagtgaaccggtgcactcatttgacctttgttcaggcgagtcagggcgtcacggaaggccggatcgaaaatatctggtgtagcccagccgagatcgccgccctggttagcagagcctggatcctgagagaactctttcgctgcggcagcaaaagtcgttttaccactcttgatatcagcagcaatctgttccagtttcacacgggcctgttcgtcagtcatgatcggcgacggtttcagcagaatatggcgagcatgaacttcggtcaccgagatatttttgctttcgccgcgcaggtcgttaactttcagaatatggaagccaacgccggaacgaatcgggccaacaatgtcgcctttcttcgcggtgcttaatgcctgggcgaagatcccgggcaactcctgaatacggccccagcccatctggccgccgttcagcgcctgctggtcggcagaatgagcaatcgccagcttaccgaaatcagcgccgttacgcgcctgatcgacaatggcgcgcgcctggctttccgcttcgttcacctgatcagaggtcgggttttccggcagcgggatcaggatgtggctcaggttcagctcagtgctggcgtcgttttggttacccacctgctgcgccagggattcgacttcctgcggcaggatggtgatgcgacgacgcacctcgttgttacgcacttcagagataatcatctctttgcggatctggttacgataggtgttgtagttcagtccatcgtaagccagacggctgcgcatctgatccagcgtcatgttgttctgtttcgcgatgttagcaatcgcctgatccagctgctcatcggagattttcactcccattttctgccccatctgcaggatgatttgatccatgatcaaacgttccatgatttggtggcgcagcgtcgcgtcatcaggaagttgctgccttgcctgagcagcgttcagttttaccgactgcattaatccatcaacgtcgctttccagcacgacgccgttattgacgacggctgcgactttatcgactacctggggggctgcgaaactggtattcgcgatcatggcgataccgagaagcagcgttttccagttcttcatactttttccatttcaattaaccgcactgcggattacgtggtaaatcaacaaatcacaaagtgttttgatacggcagaatgttcgaacgcagcatctcttgcgtacccagaccgtagttggagctcaggccgcgaagttcgatgttaaagccgattgcgttgtcatataccgcatgttgtttatcgttatcccaaccgttcagcttccgctcgtaaccgacgcgaattgcatagcagcaggagctgtattgcacacctaacatagagtcggcttgcttgttagcattggtgtcgtagtagtaggccccaacaatggaccaacgatcggcaattggccagctggcgacagcacctacctgcgaaataccattcttatattgctcagcagtggaatagtccttaggcagcgtagcctgaatatattccgggctggcgtaacggtaattcagctgtaccagacggtcttcatcccgacggtattcaatgctggagttactggtcgctacgttatccagacgtgtatcgtactgaatcccgccacgcaatccccaacgctcggagatacgccagtaagtatcgcctgcccacaccagtgaacccgttttgtcgtcattctcccatgttatgttgtcatcgccagtgcgagactccgtgaaatagtagatttgaccaacggaaatattaaaacgttcaacggcagcatcatcatatatgcgagatgtgacaccggtcgtcacctggttagcggaggcaatacggtcaagaccgccgtaagtccggtcccggaacaggccagagtagtcagattgcagcagagacgagtcgtagttatagatgtcgctctgatcgcgatacggcacgtacaaatactgcgcgcgcggttccagcgtttgggtataacccggagccagcatttccatatcgcgttcaaagaccattttgccgtcaactttgaattgcggcattacgcggttaacggattcgtccagcttggtcgtgtttctggagttataccagtcaagattggtttgctgataatgggttgccagcaacttcgcttcggtattgatgctgccccagttattagagagcggcaaattgatggtcggttccaggtgaacacgggttgcttcaggcatgtcgtctctggtgttaacaaagtgcactgcctggccgtaaatacgcgtatcaaacggaccaacatcattctggtagtaattaacgtctaactgcggctctgccgagtagctactggtgttctgttcgctgaaaacctggaactgcttggttgaaacggtggcattgaagttttgcaccgcatagccaacgctgaatttttgcgttgcgtagccgtcagtactggaaccgtacttgttatcgaaatcattgaagtagctaggatcgctgaccttggtgtagtcgacgttgaaacgccacacctgatccatgaccccggagtggttccagtagaataaccaacgacgtgaactgtcatcgttcgggggttcatcttcatagactttatctgaaggcagatagtccagttccatcaagccagcgcccgcctgggagaggtagcggaattcgttctcccacatgatgttgccacgacgatgcatataatgcggcgtgatggtggcatccatatttggcgcgatgttccagtaatatggcaggtagaactcaaagtagttggtggtggtgtacttggcgttcgggatcaagaaaccagagcgacgtttgtcacccaccggcaactgcaaataggggctataaaagatcggtaccggacccaccttaaagcgggcgttccagatctccgcaacttgttcttcgcggtcatgaataatttcgctacctaccacgctccaggtgtcagaacccggcagacaggaggtaaagctaccgttatccagaatggtatagcggttttcgccacgttgtttcatcaggtccgctttaccgcgaccctggcgacccaccatctggtaatcaccttcccagacgttggtatctttggtgttcagattcgcccagcctttcggccctttgaggatcacctggttatcgtcgtaatggacattaccgagcgcatcaacggtacgtaccggctccggttgtcctggtgcctctttttgatggagctgcacttcgtcggcctgcagacggctgttaccctgcatgatatccacgctgccagtaaacacggcgtcatccgggtagtcccctttcgcgtggtcagcattgatagtcacgggtaagtcattggtatcgccctgtaccagaggacggtcatagcttggcacgcccaacatgcactgtgaggcgaggtcggctgccagtccctgttgactataaagggcggtggcaatcatggtggccaggagagtggggatacgttttttcatacgttgattttattgttccatcatcggtaacgttgcgcgtgacaaacggtcagagactaacgtactcgtcatctctacgctagtgttaatcctgtccgaatagcgtcagtggtgttaggcacggcattgaatgacaggtatgataatgcaaattataggcgatgtcccacaattgaccgcagccggaaaacggtaaaagcacctttatattgtgggagatagccctgatatccgtgtgtcgatttggggaatatatgcagtattggggaaaaatcattggcgtggccgtggccttactgatgggcggcggcttttggggcgtagtgttaggcctgttaattggccatatgtttgataaagcccgtagccgtaaaatggcgtggttcgccaaccagcgtgagcgtcaggcgctgttttttgccaccacttttgaagtgatggggcatttaaccaaatccaaaggtcgcgtcacggaggctgatattcatatcgccagccagttgatggaccgaatgaatcttcatggcgcttcccgtactgcggcgcaaaatgcgttccgggtgggaaaatcagacaattacccgctgcgcgaaaagatgcgccagtttcgcagtgtctgctttggtcgttttgacttaattcgtatgtttctggagatccagattcaggcggcgtttgctgatggttcactgcacccgaatgaacgggcggtgctgtatgtcattgcagaagaattagggatctcccgcgctcagtttgaccagtttttgcgcatgatgcagggcggtgcacagtttggcggcggttatcagcagcaaactggcggtggtaactggcagcaagcgcagcgtggcccaacgctggaagatgcctgtaatgtgctgggcgtgaagccgacggatgatgcgaccaccatcaaacgtgcctaccgtaagctgatgagtgaacaccatcccgataagctggtggcgaaaggtttgccgcctgagatgatggagatggcgaagcagaaagcgcaggaaattcagcaggcatatgagctgataaagcagcagaaagggtttaaatgaccctgtaaatgatgccgagtaactgcccacgattaaaggtggccgccctggcggtcacttctttgagaaaaggcgtttactcagaatggtggacaggctcaatgcacggtttacgggaggggttctgtaggttttatcgcgttgaccctgcttaaggttgagagctttacgacgagcggaattatatttttacgtcttaaaaataaaaaacacatacctgaatgagcgatttttgaaagtatatttattcagaacgcgcatcatgagtttttaactcaatgcgaggctattaccatgaaagtatcagttccaggcatgccggttacacttttaaatatgagcaagaacgatatttataagatggtgagcggggacaagatggacgtgaagatgaatatctttcaacgcttgtgggagacgttacgccatctgttctggtcagataaacagactgaggcttataaacttctgttcaatttcgtgaataaccagactggcaacatcaacgcctcagaatactttactggggctatcaacgagaatgagagagaaaagtttatcaatagcctggaattattcaataaacttaaaacatgcgcaaaaaatccggatgagttggtcgcaaagggcaatatgcgctgggtcgcccagaccttcggggatatcgagttaagtgtcacttttttcattgaaaagaataagatatgtactcagacgttgcagctgcataagggccaaggtaacttgggcgttgatcttagaaaggcttaccttcccggcgttgacatgagggattgttaccttggtaaaaaaacaatgaaaggtagcaatgatatcctttatgagagacctgggtggaatgctaacctgggcggtgctaccccggacggtgctaccccggacggtgctaacccggacggtgctaacctggacggtgctatcctggacggtgctaccgtgaacggtgctacctccctatatgatgaggtaattattattaataaaatcccccccaaaaaaattgatactaaaggagttgctactgaagaagttgctactaaaaaagtactgctgaacaaattactgacaacgcaattattgaatgagccagaataagctaaggttgaaggggctggaacgccccttcaaccttagcagtagcgtgggatgatttcacaattagaaagacctgcatgatgagctagagaagaggctagtgacgcaaggcgtcgtgcaggacacggatcaccgagatgggcatcgccaaccagactgctaattagcccatgaataacaatcagaaaggaccataacagacccgttaaaatgaaatataagagacggtcaacgggtgaagaaaaagttcaaaaattcgctgtggagcaggaagggaattaccgaatggaaagcgtagccacacgcaacaactgaaagcagtttggcagaaacaaaaaatccccggactcggggatttatgtacaagaggcagcccttaggatgagggtataaacgtacaggaaaggttaaaaatccgctggcgctttaaacgtcatactattgccatacgccggatgggtaatcgtcaacatctctgcatgtagcaacaaacgtggtgccatcgctctcgcttctggtgatgcataaaaacgatcgccgagaatcggatgacccagcgccagcatatgcacacgcaattgatgcgaacgcccggtaatcggttttaacaccactcttgccgtgttatccgccgcatactccaccacttcatattccgtctgcgcaggtttacccgtttcgtaacagactttctgtttcgggcggtttggccagtcgcaaatcagcggcagatccaccagaccttctgcgggggatggatgcccccagacgcgggccacatactgctttttcggctcgcgctcgcggaactggcgttttaactcccgctccgcggctttggtcagcgccactacaatcacgccgctggtagccatatccagacgatgcaccgattctgcctgcggataatcacgctgaatgcgcgtcatcacgctgtctttgtgctcttccagacgacccggcactgacaacaaaccgctcggcttgttgaccaccataatatggtcatcctgatacaggataaccaaccagggttcctgcggtggattgtagttttccatccccattttcggctccgttactgatgcgttacaacgatcaaacgcagggcatccagacgccaacctgcctgatccaggctttccattacctgctgacggttgctctcaatggcggtcagttcgtcgtcacgaatgttcgggttcactgcacgcagagcttccagacgagacagctcggcagacagtttttcgtcggcttcgttacgcgctgcatcaatcaatgcacgggcagatttctcgatctgcgcttcacccagttgaaggatagcgtgaacatcctgctgcacggcgttaaccagtttgctgccggtgtgacggttaaccgcgttaagctggcggttaaaggtttcaaactctacctgcgccgccaggttgttgccgtttttatccagcagcatacgtaccggcgtcggtggcaggaagcggttgagctgcaactgcttcggagcctgggcttcaaccacataaatcagttccaccaacagcgtacctaccggcaacgctttgttttttaacagtgaaatcgtgctgctaccggtatcgccagaaaggatcagatccagaccgttgcggatcagcggatgctcccaggtaataaactgtgcatcttcacgcgccagcgccacttcacgatcaaaggtgatggtgatgccatcttccgacaggccagggaagtccggcaccagcatatgatcggacggcgtcagcacgatcatgttgtcgccgcgatcgtcctgattgataccgataatatcgaacaggttcatggcgaaggcgatcaggttggtatcgtcatcctgctcttcaatgctttctgccagtgcctgggctttttcgccaccgttggagtggatttccagcaggcggtcacgaccctgttccagctgtgctttcagcgcttcatgttgctcgcggcagtttttgatcagatcgtcaaagccttcggtttgatccggtgaagccagatagttaatcagatcgttgtatacgctatcgtaaatagtgcgtccggtcgggcaggtgtgctcaaatgcatccagaccttcgtgataccagcgcaccagcaccgactgagcggttttctccagataaggcacatggatctgaatatcgtgcgcctggccgatacgatccagacgaccaatacgctgctccagtagatccgggttgaatggcaggtcaaacatcaccatgtggctggcgaactggaagttacgtccttcagaaccgatttctgagcacagcagtacctgtgcgccggtgtcttcttcggcaaaccaggcggcagcgcggtcacgttcgataatcgacataccttcgtggaacaccgcagcgcgaataccttcacgttcgcgcagtacctgctccagttgcagcgcagtggcagctttggcgcagatcaccagcactttctgagagcgatggctggtcaggtagcccatcagccactcaacgcgcggatcgaagttccaccaggtggcgttatcaccttcaaattcctgataaatacgctccgggtagagcatatcgcgagcacgatcttccgcacttttacgtgcgcccataatgccggagactttaatagccgtctgatactgcgtcggtagcggcagcttaatggtgtgcagctcgcgtttcgggaatcctttcacaccgttacgcgtgttacggaacagcacgcggctggtgccgtggcgatccatcagcatcgaaaccagctcctgacgggcgctctgggcatcttcgctgtcgctgtttgctgcctgcaacagcggctcgatatcctgctcgccgatcatctcgccgagcatgttcagttcgtcattgctcagtttgttacctgccagcagcatggcaacggcgtccgcaaccggacgataatttttctgctcttcaacgaactgcgcaaaatcgtggaaacggttcgggtccagcagacgcagacgggcgaagtggctttccatccccagctgttccggggtcgcggtcagcagcagaacgcccggcacgtgctctgccagttgttcaatggcctgatattcacggcttggcgcatcttcgctccacaccaggtgatgcgcttcatcgaccaccagcaggtcccattcggcttcacagagatgttccaggcgctgtttgctacgacgggcaaaatccagcgagcaaatcaccagctgttcggtgtcaaacgggttgtaagcatcgtgctgagcttcggcataacgctcatcatcaaatagcgcaaagcgcaggttgaaacggcgcagcatttctaccagccactgatgctgtaaggtttccgggacgataattagcacacgttcagcagcgccagagagcagttgctgatgcaggatcatcccggcttcaatggttttccctaaacccacttcgtcagccagcaggacgcgcggcgcgtggcggcgaccaacatcatgagcgatgttgagctgatgcgggatcaggctggtacgctgaccgcgcaggccgctgtacggcatacggaactgttcgctggaatatttacgcgcgcgataacgcagcgcaaagcggtccatacggtcaatctgcccggcaaacagacggtcctgcggtttgctgaacaccagtttgctatcaaggaaaacttcacgcagggctacgccggactcttcagtatccaggcgagtaccgatataggtcagcaagccattttcttcttttacttcttcgacttgcatctgccagccgtcatggctggtaatggtatcaccagggttgaacatcacgcgggtcacgggggaatcactgcgtgcgtacagacggttttcaccagtagatgggaaaagtaaagtgacagttcgcgcatccaccgcgacaacggttccaagtcccaattcgctttctgtatcgctgatccagcgttgaccaagtgtaaaaggcatatgtgttcggctctatatctttaattgcaggcaataaccacccgctaccgtgcttatgaggtagtggtgttattcaggtccaggaatggaaagggcgctatggtactggatggcaaagcattcgtcacgcatcaaaatggtatctggcgaactcttttttttgctcaaaatagcccaagttgcccggtcataagtgtagcaaaattatcctcaataaaagggagtattccctccgccacgggttgtagctggcgggtcagatagtgttcgtaatccagtggtgaacgttggtagtccagcggctccgggccgttggtggtccatacgtacttaatggtgccgcgattctgatattgcaaggggcgaccacgcttttggttttcttcatcggcaaggcgagcggcgcgtacatgaggcggcacattacgctgatactcgctcagcggacggcgaaggcgtttacggtaaaccagtcgcgcatccagttcacccgccatcagtttgtcgatggtttcgcgtacatattcctgatatggctcgttgcggaagatgcgcaggtatagctcctgctgaaactgctgggccagcggcgtccagtcggtgcgcacggtttccagccctttaaacaccatccgctgcttgtcgccctcctgaatcagtccggcataacgctttttactgccggtatcggctccgcgaatggttggcatcagaaaacggcagaaatgggtttcatactccagttctaatgcgctggtcagccgttgtttttgcagcgtttccgcccaccaggcgttaacgtgctgcaccagtgcacgaccgattttcgccgcttcttcttccgaatgtgcgcctttcagccagacaaacgttgagtcggtatcgccgtagataacgtcgtagccctgtgcttcaatcaacgctttggtttgccgcatgatctgatgaccacgcatggtgatcgacgatgccagccgcggatcgaagaagcggcaggcggtggtgccgagcacgccataaaaggcattcatgatgattttcagcgcctgcgacagcggtttgttaccctggcgtttggcttcatcgcgcccgtgccagatgttagtcacaatctccggcaggcaatgtttttctcgcgagaaccaggcatcgagaaaaccttcggtactgtgctctggatcaggctgcgccatgccttccaccagcccgacgggatcaatcagaaaggtgcggatgatcgacgggtacaggcttttatagtccagcaccagcactgaatcataaagccctggccgtgaatccatcacgtagccgccagggctggcgtgcggcggcacttcgccgagattaggcgcgacataaccagcgcgatgcattcgcggaaaatagagatgaccaaatgccgccaccgaaccgccgtgtcggtccaccggcaggccgttcaccgttgcccgttcgagtaaaaatggcatgatttcagttttgtggaagatctgcgtcaccagctcgcaatctttcaggttataagttgccagcgcaggtttatcttcggcgaaacggcggtcaatttcgtccattcgatcccacgggttatcgatagattttccttcgcctaatagctcctgagcgacagtttccagcgagaatgaagagaaattccagaacgcggatttcagcgcctcgataccgtcgataattagccgacctttagcctgggcaaaaaagacgccgtttttaaagccgtgctcgcgccactccagctcgctattatcgcgcccaagacgcagcggaagacggtaacgctcggcatgtttttgcagcattcgcagatcgaactgcaccacgttccaaccgatgatcacatcaggatcgtagttggcaaaccaggcgttgagtttttccagcaactgcgggcggctggcgacgtattccagttcgaaatcaagcgaggaggcgtcgccattctccggccccagcatataaacgatgcgctgcccgcagccttccaggccgatgcagtacagctcaccgtggcgggtggtttcaatatctatagaaacccacttgagcggcggacgatagtcgggatgcggtttcagacgggcattaacgatagtgccattgtgcatatcaccctcgacccacaccggtgaggtgataaaccgctccatcagatagcgttctggcggacgcacatcggcctcgtagacggtaacgccaccttcacgcaggcgcttttcgtaattcatcaattggcgatgggcgcgacagtaaaggccatacaccggctggcggtgaaaatcctttaacgccagcggtgtcaggcgaaagccttgttcaccctgcaaaatatgctgagcgcggggaacctgatcggcgggaataaacgccacggactcttgcggtgcaagcgtaacctgcaacggcccgttgtccgtcgccagccagaaggagacttctgtcccttgcggggtgtcccgccagtgtcgggttaagataaaacctgcctgcgccacgctgaaaatccatcaaaaaaccaggcttgagtatagcctggtttcgtttgattggctgtggttttatacagtcattactgcccgtaatatgccttcgcgccatgcttacgcagatagtgtttatccagcagcgtttgctgcatatccggtaactgcggcgctaactgacggcagaatatccccatataagcgacctcttccagcacgatggcgttatgcaccgcatcttcggcatttttgccccatgcaaacgggccgtgggaatggaccagaacgccgggcatttgcgctgcatcgataccctgtttttcaaaggtttctacgatgacgttaccggtttcccactcatattcgccgttgatttctgcgtcggtcattttgcgggtgcagggaatggtgccgtagaaatagtcggcgtgggtggtgccggttgctggaatcgactgacccgcctgcgcccagatggtggcgtggcgcgagtgcgtatgcacaatgccgccaatggaggggaatgcctgatagagcagccggtgagttggcgtgtcggaggagggctttttcgtaccttcaaccacttcaccggtttcgatgctaaccacgaccatatcgtcagcggtcatgacgctgtaatcgacgccggaaggtttgatcacaaagacgccgcgctcgcgatcaacggcgctgacgttgccccatgtgagcgtgaccaggttgtgttttggcagcgccaggttggcttctaatacctggcgtttgagatcttctaacatgttgactccttcgtgccggatgcgctttgcttatccggcctacaaaatcgcagcgtgtaggcctgataagacgcgccagcgtcgcatcaggcgttgaatgccggatgcgctttgcttatccggcctacaaaatcgcagcgcgtaggcctgatagacgcgccagcgtcgcatcaggcgttgaatgccggatgcgctttgcttatccggcctacaaaatcgcagcgtgtaggccagataagacgcgtcagcgtcgcatcaggcgttacataccggatgcggctacttagcgacgaaacccgtaatacacttcgttccagcgcagcgcgtctttaaacgctggcaggcgtgtgtcgttatcaatcaccgtgatttcaatgtcgtgcatctcggcgaattggcgcatatcgttgaggttcagtgcatggctgaagacggtatggtgcgcgccaccagcgaggatccacgcttcggaagcagttggcagatccggttgcgcttcccacagcgcattcgccaccggcagtttcggcagggagtgcggtgttttcaccgtgtcgatgcagttaaccagtagacggtaacgatcgccgagatcaatcaagctggcgacaatcgctgggccggtttgggtattgaagatcaggcgggcaggatcgtccttaccaccaataccgagatgctgaacgtcgaggatcggtttctcttctgcggcgatcgacgggcagacttccagcatatgggagccgagcaccaggtcattacctttctcgaagtgataggtgtagtcctccataaaggaggtgccgccctgcagaccggttgacatcaccttcatgatgcgaagcagggcggcagttttccagtcgccttcgcccgcaaagccgtaaccctgctgcatcagacgctgtacggccagaccaggaagctgtttcagaccgtgcaaatcttcaaaggtggtggtgaacgcgtggaagccaccttgttccaggaaacgcttcatccccagctcaatacgcgccgcttccagcacgttctgtcgttttttgccgtggatttgtgtggcaggcgtcatggtgtagcagctttcgtactcatcgaccagcgcgttaacatcgccgtcgctgatggagttcaccacctgcaccagatcgccaaccgcccaggtattgacggagaaaccgaacttgatctgtgcggcaactttatcgccatcggtgaccgccacttcacgcatgttatcgccaaatcggcagactttcagatgacgggtatcctgtttagagaccgcctgacgcatccaggagccgatacgctcatgggcttgtttatcctgccagtgaccggtaaccacggcatgttgctgacgcatacgcgcgccaatgaagccgaactcgcgaccgccatgtgcagtctggttcaggttcataaagtccatatcgatactgtcccacggcagcgccgcgttgaactgggtgtggaattgcagcaacggtttgttgagcatggtcaggccgttgatccacattttggccggggagaaggtgtgcagccacaccaccagaccagcgcaacgatcgtcgtaattcgcgtcgcggcaaatagcggtgatttcatccggcgtggtgcccagcggtttcaacaccagtttgcagggcagtttcgcttccgtattcagcgcattaacgacgtgctcggcatgttgggtgacctgacgcagggtttccgggccatacagatgctggctgccaatgacaaaccacacttcataattatcaaaaatcgtcattatcgtgtccttatagagtcgcaacggcctgggcagcctgtgccggggcggaagttggaagatagtgttgttcggcgctcatcgcccattgctgatagcggcgataaagctgttcaaagcgttgtgcctgctcgctgcacggttgcagggttttctctaccgcactggccattttttgctgagctgatgggatgtctgcgtgcactttcgcggcgacggcagcaaaaatcgccgcaccgagcgcacagcactggtcagaggcaacaatttgcagcgggcgattcagcacgtcgcagcaggcctgcataatgacctggtttttccgcgcgatgccgcccagtgccatcacgttattaacggcgatcccctgatcggtaaagcactccatgattgcgcgtgcgccaaaggcggtggcagcaatcaaaccgccgaacagcagcggagcgtcggtagcgaggttaagatcggtaatcacccctttcaggcgttggttagcgttcggtgtgcggcggccgttaaaccagtcgagcaccaccggcaggtgatccagagacggatttttggcccatgcttcggtcagcgccggaagcagttgtttctggctggcgttgatttgcgttttcagttccggatgctgggcggcaagctgttccagcggccagccgagtacgcgaccaaaccaggcgtagatatcaccaaacgccgattggcctgcttccagaccgataaatccaggcaccacgctgccatcaacctgaccgcaaatacctttaactgcccgctcgccaacgctctgtttgtcggcaatcagaatgtcgcaggtggaagtaccgataacttttaccagtgcgttaggctgtgcgcctgcgccaactgcgcccatatggcagtcaaacgcgccgccggaaatcaccacgctttcaggcaggccgagacgctgcgcccattccgggcataaggtgcccaccggaatatcggcagtccaagtgtcagtgaacagcggggaaggcaaatggcgattgaggatcgggtccagctcatcaaagaaactggctggcggcaggccgccccagctttcgtgccacagagatttatgcccggcgctgcaacgtccgcgacgaatatcctgcgggcgggtggtaccggaaagcagagctggcacccagtcgcacagctcaatccacgatgcggcagattgcgccacggcgctgtcctggcgagtcacatgcaggatttttgcccagaaccattcgctggaataaataccaccaatgtagcgggagtagtcaacgttgcccggcgcgtggcacaaacgggtaatctcttccgcttcttcaaccgcagtgtggtctttccacaatacgaacatcgcgttcgggttttcggcaaactccgggcgcagcgccagcacgtttccgtcggcatcaatcggtgcgggcgtcgagccggtactgtcaacgccaatcccgaccacagctgcgcgctgttcgacgctaagctctgcaagcacggttttcagtgccgcttccattgactcaatgtagtcacgcggatgatgacggaactggttattcggggcatcacaaaattgccctttctgccaacggggataccactctacgctggtggcgatctcttcaccggtagcgcagtccaccgccaaagctcgcacagaatcactgccaaaatcgaggccaattgcaatcgccatcgtttcactccatccaaaaaaacgggtatggagaaacagtagagagttgcgataaaaagcgtcaggtaggatccgctaatcttatggataaaaatgctatggcatagcaaagtgtgacgccgtgcaaataatcaatgtggacttttctgccgtgattatagacacttttgttacgcgtttttgtcatggctttggtcccgctttgttacagaatgcttttaataagcggggttaccggttgggttagcgagaagagccagtaaaagacgcagtgacggcaatgtctgatgcaatatggacaattggtttcttctctgaatggtgggagtatgaaaagtatggctgaagcgcaaaatgatcccctgctgccgggatactcgtttaacgcccatctggtggcgggtttaacgccgattgaggccaacggttatctcgatttttttatcgaccgaccgctgggaatgaaaggttatattctcaatctcaccattcgcggtcagggggtggtgaaaaatcagggacgagaatttgtctgccgaccgggtgatattttgctgttcccgccaggagagattcatcactacggtcgtcatccggaggctcgcgaatggtatcaccagtgggtttactttcgtccgcgcgcctactggcatgaatggcttaactggccgtcaatatttgccaatacgggtttctttcgcccggatgaagcgcaccagccgcatttcagcgacctgtttgggcaaatcattaacgccgggcaaggggaagggcgctattcggagctgctggcgataaatctgcttgagcaattgttactgcggcgcatggaagcgattaacgagtcgctccatccaccgatggataatcgggtacgcgaggcttgtcagtacatcagcgatcacctggcagacagcaattttgatatcgccagcgtcgcacagcatgtttgcttgtcgccgtcgcgtctgtcacatcttttccgccagcagttagggattagcgtcttaagctggcgcgaggaccaacgcattagtcaggcgaagctgcttttgagcactacccggatgcctatcgccaccgtcggtcgcaatgttggttttgacgatcaactctatttctcgcgagtatttaaaaaatgcaccggggccagcccgagcgagtttcgtgccggttgtgaagaaaaagtgaatgatgtagccgtcaagttgtcataattggtaacgaatcagacaattgacggcttgacggagtagcatagggtttgcagaatccctgcttcgtccatttgacaggcacattatgcaagcattgctggaacactttattacccaatccaccgtgtattcattgatggcggtggtgttggtggcctttctggagtcgctggcgctggtcggtttgattctacccggtacggtgctgatggcggggctgggagcgctgattggcagcggcgagttaagtttctggcacgcctggctggcagggattattggctgcttgatgggcgactggatttctttctggttgggttggcgttttaaaaagccgttgcatcgctggtcatttctgaagaaaaacaaagcactacttgataaaactgaacatgcgttgcatcaacacagcatgttcaccattctggtcggtcgttttgttggcccgacgcgtccgctggtgccaatggtggcgggaatgctggatctgccggtggctaaatttattacgccgaatattatcggctgcctgctgtggccgccgttttacttcctgccagggattctggcgggcgcggcgatcgatattcctgccggaatgcagagcggtgagtttaaatggttgctgctggcaacagcggtgtttttgtgggttggtggctggctgtgctggcggttatggcgcagcggtaaagcgactgaccgtttgagtcattatttgtcccgcggtcgtttgttgtggctgacgccgttgatttctgccatcggcgtggtggcgctggtggtgttaattcgccacccgttgatgccggtgtatatcgatattttgcgtaaagtggttggggtttaggagatagtcttgtgcgggttgcctgatgcgacgcttgccgcgtcttatcaggcctacaaaacgcactacccgtaggtcggataaggcgttcacgccgcatccgacagtgcatactaacccgtaatccccaatagtgccgaagcactcgccttaccgctcaacaactcattggtcataccctgccaggcgatgcgcccgtcggcgactactaccgagcgcgtggcgatccgcgccgcatcttccacgctgtgcgacaccatcaatagcgtcattttttgctgctggcagctcgtgctcaccagcgtcaacatctcctgacgtaacgccggatcgagcgcagagaacggttcatcgagcaataaaatcggctgttcgcgtaccagacaacgcgctaacgccactcgctgtcgctgaccgccggaaagctcgcccggtaaccgcgccattaaattatcaatccccatctggcgggcgatagcgtgcattttcccctgctgtaccgcgttcagtttcaatcccggatttagccccagcccgatgttctgtgcgaccgtcaggtggctgaacaggttgttctcctgaaacagcatcgacaccggacggcgtgacggcggcatagttgtgtgatctacgccatcgatagtcagcgaaccgctggctggcgtcagaaaaccggcgatcaaattcagcagggtacttttacccgcgccgcttggcccgaggatcgccacctgctcgccgcgttccaccgttaagctaaaacgcatcggcaaatggtggtaaagccaggtgatatcagtcagttttaacatttcgccccggtagtttttcaatcacggtaaacagcagaaaacagagcagcagcagaattaacgcggtgaccgcaccgtcctggctgcgataggagccaatttgctggtagagataaaacggcagggtgcggaaatcatcgttaccgaacaacgccaccacgccaaaatcaccaatcgacagcacgcatgcaaaggccagcgcctgcgccagtggacgtttcagggcgcgcagctccaccacttttaagcgtgaccagccttcaatccccagcgactgacataacatgctgtagcgggcggtgatatcgcgcatcgggttttccagcactttcagcgcataagggatcgccattaacgcattggtgaaaatcacaatgccgtcagcagattgtggcaggccgatagtgttgttgagcagtaaaaagaagccggtagccagcacaatccccggcatggcgaggatcaacatgccgctcatctccagcacctgacccgccagcattttctgccgcgcccgcagttcgcgactgctccatagcagcatcatggtcagcactacgcacaatacacctgccgccagcgcaatacgcaacgaggtccacagcgcctgccacagcaccggttgtgccagcacttccggcaactggcgatttaccccatcgacgatcaccgccagtaacggtggcagcaacagcagcagcgccagcacaattaacaccgtgtcgcaaatgcggctatgcagacgatcgtccgggtcgcgccagccttgcagcagcgtggtgccgggcgcaatggccttactcaatcgctgactcaacagcaccagcccgaggcagcacaccatctggagcagcgccagcattgccgcgcgggcaggatcgtagtcgtaactcagcgcctgatagattgccagctcgatagtggtcgcctgcggaccgccccccagcgatagcacggtggcgaagctggcgaaacagagcataaagataagcgcagcaaccggcgggatttgtcgccgtaaccacggccattcgacgaagcggaaaaaatgccagctacgcatcccaagctgggcggcaagttgacgctgttcgccggggatgttttccagtgcctggagtaataagcggctcgccatcggcagattaaaaaacacatgggccagcaaaataccttgcaggccgtagggcgaaaaggtccactccagaccgagcgattggcagagtgttgccagccagccctggcgaccatagacgctaagaatgccgaaaacagcgaccaaccccgggaggatcaaggtcattgcacacagacgcaacagcgccagccgacccggaaagcgcctgcgatagagcgcgcgggcgaggaatatcgcgggtatgacagagagcagtgccgagagaaacgcctgccagaaggagaagcgcaccacatgccacagatagctgtcctgccagactgccacccagtcatcctgcggcgcgttccaccacagggcgagaaacgccgccagcgcaaccgctaccaccagcgtggtggcgcttacacctggaattaaccagccgggaattaacggctgacggcgcgttgccattcgctaatccatgcctgacgttgtgccgccacttcggctggcgtgaactccaacgtggttgcgggtttggtcaatttttcaaaaccggcaggcagcgtgacgtttgccaccggatacatccagttgccggttgggatcgcattctggaaagccggagaaaccataaactggaggaatttttgcgccagctccggctgcttgctggcagcggtgcgggcggcgacttccacttgcagatagtgaccttcgctgaagttcgcggcggcgtagttatctttcttctcttcgagaatgtgataagccggagaggtggtgtaactcagtaccagatcgctttcaccttttaaaaacaggccgtaggcttcgctccagcctttggtgaccgtgaccgttttcttcgccagtttctgccaggcttgtggggcgtcatcgccatagactttttgcatccatagcaacagacccagccccggtgtactggtgcgcggatcctgataaatcacccgccagttttgatcgctctcaaccagttctttcaggctttgtggcgggtttttcagtttgttcttgtcataaacgaaggcgaagtagccataatcaaacggtacgaaagtgtcattattccagccgccgggaacgttaacggcatccgctgccacaccgcttttggcaaacagtccggttttactggcggcgtctaacaggttgttatccagccccagcaccacatcggctttactgtttttgccttccatccgtagacggttgagaagcgaaacgccatcttccagcgccaccagtttcagttcgcaattacagtcggcttcaaaggcttttttaaccaccggaccaggcccccagtcggcggcgaaggaatcgtaggtataaacagtcagaacgggtttagcgaaaacgggcgctgtgcacagcaacagcaggggcagacatttttttaacactttgcacctcaaaaaagagtggcaaaggacttgagaaggagcctcaaatcccttcgccggcgttatccggatcaggttcgacgggtattttctcagcgcacgcgtacgcgtggcaccccgttgagaacggcgttagtgtagtgattttgttatcaaccagcaatcatggatccggtggcgcaaaccacgctgatttaaaatcgaaccagccgagggtattcatgcgcaggccgcgcatactgcgttgcccctgaatgatcagccagtggtgcaataatggcaccatcgctttgctggcgaccagttgctggcaccagttcgccagattcatctcgccattgcgccagcgagcagcgtcggcttgccagtcaatgggaatgcaatgttgtagcagtggcacttcgcataaatgtgcgaaaacagagaagtccagcggcagggtaaagttggcgctgtttagccagatatcactttcgatctctcctgtatgccactgatcgtagtcgatctctttgattttcagcgtgacctggtgacttgccagaatctgctgcatgatcccggcaatcacccgatgctcactgtgatcctgataaaaggttagggtgaggctttccaggccagccggtttttcgctctttatggtgcgggcatggtgccaacgggggagcagtccataagccgggaaccacagttgctggtactgttcctcagcgaaatagaccagattagttggagaaagcacatagcttacccagtccctgacttgctgattcgccccgcgatgggtgcggctgtcgaacagtaaatagtagcaaccttcctccaggcggctttcaatctctttttcctcgccctgtggaccttttagcatcagccctccggctggctcgtcggcaatttccggcagaacccagacgttaacttcgtcgattaatgcccggtaaccgaagaagtcatcgaatgcctgaattttcagttgattggtgctgttgcgaatcaccgcatacggaccggtgccgatgggatggctggcaaagttactgagggtttcccattcgcgcggcaggatcatcgccggaacttgccccagcagtaacggtaaccagcggtccggttgcgtgagatggatatccagcgtccagggcgtcggcgacacaatgtcagcaatatgcgaatagagcggcagcgtattgattcgttttaaagaggcgatcacatcgtccatttccagttcacgaccatggtgaaaatggactcctggacgcaaaaagaaacgccagtgaagcggtgaaatttgctgccagtggtgggcgatgtctgcttccagttccccattttcctcatttatgcgcgttagcgaactgaagatttgccgggcgatatgggtttcggaacggcgcaatgcgctgccaggtagcagattacgcaacggacgatagtagagcacgcgcaggatgtgccgcccctggcggaagctgcggcccagatgagaaaccagcatttgccgcacagtcgctttgtcgccaaccaactgcaccagttgatcgatacgatcctgctccagcaggtcttccgcccgctgttgctgaagcgccagcccggtatagaggaatgtcagacgcgagcgtttaccgcgcccgacttccgcttcccacgtcagccagccgcgatcctgcatggtgttgagcagggtgcgcatatgacgacgcgagcagctcaataacgctgccagttcgttgagcgttgtgtcctgcgatttaccctcgcagcattgccacaggcggatgaactgttgttgcagacgagcagatggcataaaaggggaactcctgtgcaaaagacagcaattttattttccctatattaagtcaataattcctaacgatgaagcaagggggtgccccatgcgtcagttttatcagcactattttaccgcgacagcgaagttgtgctggttgcgttggttaagcgtcccacaacgattaaccatgcttgaaggactgatgcagtgggatgaccgcaattctgaaagttgacttgcctgcatcatgtgtgactgagtattggtgtaaaatcacccgccagcagattatacctgctggttttttttattctcgccgcgctaaaaagggaacgtatgatctggataatgacgatggctcgccgtatgaacggtgtttacgcggcatttatgctggtcgcttttatgatgggggtggccggggcgctacaggctcctacattgagcttatttctgagtcgtgaggttggcgcgcaacctttctggatcggcctcttttatacggtgaatgctattgctgggatcggcgtaagcctctggttggcaaaacgttctgacagtcagggcgatcggcgaaaactgattatattttgctgtttgatggctatcggcaatgcgctattgtttgcatttaatcgtcattatctgacgcttatcacctgtggtgtgcttctggcatctctggccaatacggcaatgccacagttatttgctctggcgcgggaatatgcggataactcggcgcgagaagtggtgatgtttagctcggtgatgcgtgcgcagctttctctggcatgggttatcggtccaccgttggcctttatgctggcgttgaattacggctttacggtgatgttttcgattgccgccgggatattcacactcagtctggtattgattgcatttatgcttccgtctgtggcgcgggtagaactgccgtcggaaaatgctttatcaatgcaaggtggctggcaggatagtaacgtacggatgttatttgtcgcctcgacgttaatgtggacctgcaacaccatgtacattattgatatgccgttgtggatcagtagcgagttaggattgccagacaaactggcgggtttcctgatggggacggcagctggactggaaataccagcaatgattctggctggctactatgtcaaacgttatggtaagcggcgaatgatggtcatagcagtggcggcaggagtactgttttacaccggattgattttctttaatagccgtatggcgttgatgacgctgcaactttttaacgctgtatttatcggcattgttgcgggtattgggatgctatggtttcaggatttaatgcctggaagagcgggggcagctaccaccttatttactaacagtatttctaccggggtaattctggctggcgttattcagggagcaattgcacaaagttgggggcactttgctgtctactgggtaattgcggttatttctgttgtcgcattatttttaaccgcaaaggttaaagacgtttgatgacgtggacgatagcggaaagcccggtcatttgaccgggcaaggggattaattcataaacgcaggttgttttgcttcataagcggcaatggcgtcgtcgtgctgcaaggtaagcccaatactgtccagaccgttcatcatgcagtggcggcggaaggcatcgatggtaaagcgataggttttctctcccgctttcacctcttgcgcttccagatccacgtcgaaatggatccccggattagctttcaccagcgcaaacagttcgtccacttctgcatcgcttaatttcaccggcagcagctggttgttaaagctattgccgtagaagatgtcagcaaaactcggcgcaatcaccactttaaaaccgtagtcggtcaatgcccagggcgcgtgctcacgcgaagagccacagccgaagttttctcgtgccagcaaaatggaagcgccctgatactgcgggaagttcagcacgaagtccgggtttggctgttggcctttttcatccagaaaacgccagtcgttaaacagatgcgcgccaaaacccgtacgggtcactttctgcaaaaactgtttcgggatgattgcatcggtatcgacattggcggcatccagcggaaccaccaggcctgtgtgtttgataaatttctctgccatggtgtgctccttatttaatgttgcgaatgtcggcgaaatgtccggtcacagcagcagcggcagccattgccgggctgaccagatgcgtgcgcccgccgcgcccctggcggccttcaaagttacggttgctggtggaggcacaacgttcgcccggattcagacggtcgttgttcatcgccagacacattgagcagccaggcaagcgccattcaaaaccggcttcaataaagattttatccagaccttccgcttccgcctgggcttttaccgggccagagccgggaaccaccagtgcctgcacgcctggcgcgacttttcgccctttggcgatctccgctgccgcgcgtaaatcttcaatgcgcgagttggtacaggaaccgataaacactttgtcgatagccacttcggtcagcggaatacccggtttcagccccatataggccagcgctttttctgccgacgcgcgttcaaccggatcggcaaacgaagccggatcgggaatattgtcgttcacggaaatcacctggccgggattggtgccccaggtgacctgcggtgaaatttcttctgcttgcagagtgacaacggtatcgaaagttgcgccttcgtcggtttgcagggttttccagtaggcaacggcgtcgtcgaaatctttgcctttcggcgcatgcagacggcctttgacatagttaaaggtggtttcgtccggtgcaaccagaccggcttttgcgcccatttcgattgccatattgcacagggtcatacgaccttccatgcttaaatcacggattgcttcgccgcaaaactccaccacatgcccggtgccgcctgcgctaccggttttaccgataattgccagcacgatatcttttgcggtaatgcccggcgcggctttgccctggacttcaattttcatggtttttgcgcggccctgtttcagggtttgcgttgccagtacgtgttcaacttcggaagtgccgataccaaaggccagtgcgccaaacgcgccgtgggtggcggtatgcgagtcgccgcagacaatggtcatccccggcaaggtgacgccctgttccggccccattacgtggacgatcccctgatacgggtgattcaggtcatacagttcgacgccaaattctttgcagtttttgatcagttcctgcatctggatacgcgccatttcaccgcaggcattaatgtctttggtctgggtagagacgttgtgatccatggtagcgaaggttttgcccggctgacgtaccgggcgaccgtgggcgcgcagaccatcgaacgcctgcggtgaggtcacttcatgcaccaggtggcggtcgatatataacagtggggtttcgttttcggcttcgtacacaacgtgagcgtcgaacaatttttcgtataacgtcttagccatgattacaccccttctgctacatagcgggcaatgatatcgcccatttcatcggtactaacggcggcagcgccacgggctaaatccccggtgcgaatgccttcttctaatgcgcggttaatggcgcgttcaatggcgcaagccgcatcatcggcatccaggctgtaacgcagcagcagtgccagcgaaaggatttgtgcaatcgggttggcgatgtttttgcctgcgatatctggtgccgagccgcccgccggttcatacagtccaaaaccttgctcgttcaggctggcggaaggcaacatccccatcgagccagtgatcattgcgcactcgtcagacagaatatcgccaaacaggttggagcacagcagaacgtcaaactgtgatggatctttaatcagctgcatggtggcgttgtcgatgtacatatgcgccagttcgacatccgggtattccgtggcgatctcgttaacgatctcccgccataaaatagaggattgcagcacgttggctttatcgatcgacgtcactttgtggcgacgcttgcgagcagattcaaacgcgatgcgggcgatacgttcgatctcaaaacggtgatacacctcggtatcaaaggctttttcatattgtccgctaccttcgcggccttttggctgaccgaaatagatgccgccggtcagttcgcgcacacacaggatgtcgaagccgtttgcggcaatgtctgcacgcagcggacagaatgcttccagcccctgatacagttttgccgggcgcaggttgctgaataatttgaagtgcttacgcagaggcagcagcgcgccgcgttctggttgctggtctggtggtaaatgttcccacttcgggccgcctaccgagccaaacagcacggcatcggcttgctcacaaccttcaaccgtcgcaggcggcagtggttgcccgtggttatcaatggctgcgccgcctacatcgtaatggctggtggtgatgcgcatcgcaaagcggttgcgcacggcatccagcactttcagcgcctgggtcatcacttccggaccaataccgtcccccggcaatacggcaatatggtaattcttcgacatcacacggtttccttgttgttttcgttgtgttgagctttgcgttgcaactctttttcgacttctgcggcacgccagatattgttcagaacgtgcaccatggctttggcagatgactcgacaatatcggtagccaggccgacgccgtggaagcggcgaccgttgtagttagcgacgatatccacctgacccagcgcatctttaccgtggcctttggcggtcaggctgtatttcaccagttcgacgttatattcagtgatgcggttaattgcctgatagacggcatcgaccggaccgttaccgttggcggcttctgctttgacttcttcgccacaggccagtttgacggcggcggtggcgatatcgttagagccagactgcacgctgaagtaatccagacggaaatgctccggctcttcttgctgcttaccgatgaaggccagcgcctccagatcgtaatcaaacacctgaccttttttgtccgccagcttcaggaaagcatcgtacaaattgtctaaattatattcactttctttataccccatctcatccatgcgatgtttcaccgccgcacgccccgaacgagaggtcagattcagctggatttggttcagaccaatagattctggtgtcatgatttcgtagttttcgcggtttttcagcacgccatcctggtgtataccggaggagtgtgcgaatgcgccgctgccaacaatggctttgtttgccgggatcggcatattacaaatctggctaactaactggctggtgcgccatatctcctggtgattaatggcggtgtggacgttgagaatatccttacgaactttgatcgccatgatgacttcttccagggaacagtttccggcacgctcgccgatcccgttcattgcgccttccacctggcgtgcaccggcatgtaccgccgccagtgagtttccgaccgccaggcccaaatcgtcgtgggtatgtacggagataatggctttgtcgatgttaggcacgcgttcatacaggccgctgatgattccggcgaactcaaacggcatggtgtagcccacggtgtccggaatgttgatggtggtggcaccggcattaatcgccgcttcgaccactcgcgccagatcggcaatgggtgtacgcccggcatcttcgcaagaaaattcaacatcatcggtgtaattacgggcgcgtttcaccatatagatagcgcgttcgatcacctcgtccagcgtgctgcgcagcttggtggcgatgtgcattggcgaagtggcaataaaggtatgaatacggaaggcttcggcgactttcagggattcggccgccacgtcgatatctttttccacgcagcgagctaacgcacatacgcggctgtttttaacctggcgggcgatggtttgcaccgattcaaaatcgcccggcgaagagacggggaaaccgacttccatcacgtcaacacccatacgctcaagggccagcgcaatttgcagtttttctttcacactcaagcttgcctgtaacgcctgttcaccgtcgcgcaatgtggtatcgaaaataatgacttgctggctcatggtttgggtccttgtctcttttagagcgcctcgcttcgggcataaaaaaacccgcgcaatggcgcgggttttttgtttgactgcgtgctggcttaatgctggatgccgctcactcgtctaccgcgcaaagaagatgcgtttagtagtagtagaccgataaagcgaacgatgtgagtcattaaatcagctccagatgaatgcgatatgcttttagagttactggatacaaaaacggatgtcaaccctgacgcaataaaaacgtcccgccagcgtgagttctgcatccgtaaaattagctaattgtgctgcggtggttaaagtaagcgatattaatttctgcttaactaccgacgcttttcatcggttgacatatttcagcataaatttttgcatctaatcaacgaggaaaaaggggacaaaatgcacgcgttgcaaaacctatcctgatgatttgtattgaattatatgttttgcgattttttttgatattgatttggtgaatattattgatcaattaatgttaagaattaatgcattaaatatataaattaattattaaataagcacatttaatccattttgtagatgattgagtattcgcggtagttatgattagattgttttcgcaacaaaaacattatggattattatgctgtggtaaatgactcattccacggcaatggattctgtttttatcagaacccgtatctttatgttttccgaattttactcattttgctttttcttattttatatgcatgataaatcatattcttcaggattatttctctgcattccaataagggaaagggagttaagtgtgacagtggagttaagtatgccagaggtacaaacagatcatccagagacggcggagttaagcaaaccacagctacgcatggtcgatctcaacttattaaccgttttcgatgccgtgatgcaggagcaaaacattactcgtgccgctcatgttctgggaatgtcgcaacctgcggtcagtaacgctgttgcacgcctgaaggtgatgtttaatgacgagctttttgttcgttatggccgtggtattcaaccgactgctcgcgcatttcaactttttggttcagttcgtcaggcattgcaactagtacaaaatgaattgcctggttcaggttttgaacccgcgagcagtgaacgtgtatttcatctttgtgtttgcagcccgttagacagcattctgacctcgcagatttataatcacattgagcagattgcgccaaatatacatgttatgttcaagtcttcattaaatcagaacactgaacatcagctgcgttatcaggaaacggagtttgtgattagttatgaagacttccatcgtcctgaatttaccagcgtaccattatttaaagatgaaatggtgctggtagccagcaaaaatcatccaacaattaagggcccgttactgaaacatgatgtttataacgaacaacatgcggcggtttcgctcgatcgtttcgcgtcatttagtcaaccttggtatgacacggtagataagcaagccagtatcgcgtatcagggcatggcaatgatgagcgtacttagcgtggtgtcgcaaacgcatttggtcgctattgcgccgcgttggctggctgaagagttcgctgaatccttagaattacaggtattaccgctgccgttaaaacaaaacagcagaacctgttatctctcctggcatgaagctgccgggcgcgataaaggccatcagtggatggaagagcaattagtctcaatttgcaaacgctaactgattgcagaataggtcagacatgaatgtctggtttattctgcattttttattgaatgtagaattttattctgaatgtgtgggctctctattttaggattaattaaaaaaatagagaaattgctgtaagttgtgggattcagccgatttattatcaatttaatcctctgtaatggaggattttatcgtttcttttcacctttcctcctgtttattcttattaccccgtgtttatgtctctggctgccaattgcttaagcaagatcggacggttaatgtgttttacacattttttccgtcaaacagtgaggcaggccatggagatgttgtctggagccgagatggtcgtccgatcgcttatcgatcagggcgttaaacaagtattcggttatcccggaggcgcagtccttgatatttatgatgcattgcataccgtgggtggtattgatcatgtattagttcgtcatgagcaggcggcggtgcatatggccgatggcctggcgcgcgcgaccggggaagtcggcgtcgtgctggtaacgtcgggtccaggggcgaccaatgcgattactggcatcgccaccgcttatatggattccattccattagttgtcctttccgggcaggtagcgacctcgttgataggttacgatgcctttcaggagtgcgacatggtggggatttcgcgaccggtggttaaacacagttttctggttaagcaaacggaagacattccgcaggtgctgaaaaaggctttctggctggcggcaagtggtcgcccaggaccagtagtcgttgatttaccgaaagatattcttaatccggcgaacaaattaccctatgtctggccggagtcggtcagtatgcgttcttacaatcccactactaccggacataaagggcaaattaagcgtgctctgcaaacgctggtagcggcaaaaaaaccggttgtctacgtaggcggtggggcaatcacggcgggctgccatcagcagttgaaagaaacggtggaggcgttgaatctgcccgttgtttgctcattgatggggctgggggcgtttccggcaacgcatcgtcaggcactgggcatgctgggaatgcacggtacctacgaagccaatatgacgatgcataacgcggatgtgattttcgccgtcggggtacgatttgatgaccgaacgacgaacaatctggcaaagtactgcccaaatgccactgttctgcatatcgatattgatcctacttccatttctaaaaccgtgactgcggatatcccgattgtgggggatgctcgccaggtcctcgaacaaatgcttgaactcttgtcgcaagaatccgcccatcaaccactggatgagatccgcgactggtggcagcaaattgaacagtggcgcgctcgtcagtgcctgaaatatgacactcacagtgaaaagattaaaccgcaggcggtgatcgagactctttggcggttgacgaagggagacgcttacgtgacgtccgatgtcgggcagcaccagatgtttgctgcactttattatccattcgacaaaccgcgtcgctggatcaattccggtggcctcggcacgatgggttttggtttacctgcggcactgggcgtcaaaatggcgttgccagaagaaaccgtggtttgcgtcactggcgacggcagtattcagatgaacatccaggaactgtctaccgcgttgcaatacgagttgcccgtactggtggtgaatctcaataaccgctatctggggatggtgaagcagtggcaggacatgatctattccggccgtcattcacaatcttatatgcaatcgctacccgatttcgtccgtctggcggaagcctatgggcatgtcgggatccagatttctcatccgcatgagctggaaagcaaacttagcgaggcgctggaacaggtgcgcaataatcgcctggtgtttgttgatgttaccgtcgatggcagcgagcacgtctacccgatgcagattcgcgggggcggaatggatgaaatgtggttaagcaaaacggagagaacctgattatgcgccggatattatcagtcttactcgaaaatgaatcaggcgcgttatcccgcgtgattggccttttttcccagcgtggctacaacattgaaagcctgaccgttgcgccaaccgacgatccgacattatcgcgtatgaccatccagaccgtgggcgatgaaaaagtacttgagcagatcgaaaagcaattacacaaactggtcgatgtcttgcgcgtgagtgagttggggcagggcgcgcatgttgagcgggaaatcatgctggtgaaaattcaggccagcggttacgggcgtgacgaagtgaaacgtaatacggaaatattccgtgggcaaattatcgatgtcacaccctcgctttataccgttcaattagcaggcaccagcggtaagcttgatgcatttttagcatcgattcgcgatgtggcgaaaattgtggaggttgctcgctctggtgtggtcggactttcgcgcggcgataaaataatgcgttgagaatgatctcaatgcgcaatttacagcccaacatgtcacgttgggctttttttgcgaaatcagtgggaacctggaataaaagcagttgccgcagttaattttctgcgcttagatgttaatgaatttaacccataccagtacaatggctatggtttttacattttacgcaaggggcaattgtgaaactggatgaaatcgctcggctggcgggagtgtcgcggaccactgcaagctatgttattaacggcaaagcgaagcaataccgtgtgagcgacaaaaccgttgaaaaagtcatggctgtggtgcgtgagcacaattaccacccgaacgccgtggcagctgggcttcgtgctggacgcacacgttctattggtcttgtgatccccgatctggagaacaccagctatacccgcatcgctaactatcttgaacgccaggcgcggcaacggggttatcaactgctgattgcctgctcagaagatcagccagacaacgaaatgcggtgcattgagcaccttttacagcgtcaggttgatgccattattgtttcgacgtcgttgcctcctgagcatcctttttatcaacgctgggctaacgacccgttcccgattgtcgcgctggaccgcgccctcgatcgtgaacacttcaccagcgtggttggtgccgatcaggatgatgccgaaatgctggcggaagagttacgtaagtttcccgccgagacggtgctttatcttggtgcgctaccggagctttctgtcagcttcctgcgtgaacaaggtttccgtactgcctggaaagatgatccgcgcgaagtgcatttcctgtatgccaacagctatgagcgggaggcggctgcccagttattcgaaaaatggctggaaacgcatccgatgccgcaggcgctgttcacaacgtcgtttgcgttgttgcaaggagtgatggatgtcacgctgcgtcgcgacggcaaactgccttctgacctggcaattgccacctttggcgataacgaactgctcgacttcttacagtgtccggtgctggcagtggctcaacgtcaccgcgatgtcgcagagcgtgtgctggagattgtcctggcaagcctggacgaaccgcgtaagccaaaacctggtttaacgcgcattaaacgtaatctctatcgccgcggcgtgctcagccgtagctaagccgcgaacaaaaatacgcgccaggtgaatttccctctggcgcgtagagtacgggactggacatcaatatgcttaaagtaaataagactattcctgactattattgataaatgcttttaaacccgcccgttaattaactcaccagctgaaattcacaataattaagtgatatcgacagcgcgtttttgcattattttgttacatgcggcgatgaattgccgatttaacaaacacttttctttgcttttgcgcaaacccgctggcatcaagcgccacacagacgtaacaaggactgttaaccggggaagatatgtcctaaaatgccgctcgcgtcgcaaactgacactttatatttgctgtggaaaatagtgagtcattttaaaacggtgatgacgatgagggattttttcttacagctattcataacgttaatttgcttcgcacgttggacgtaaaataaacaacgctgatattagccgtaaacatcgggttttttacctcggtatgccttgtgactggcttgacaagcttttcctcagctccgtaaactcctttcagtgggaaattgtggggcaaagtgggaataaggggtgaggctggcatgttccggggagcaacgttagtcaatctcgacagcaaagggcgcttatcagtgcctacccgttatcgggaacagctgcttgagaacgctgccggtcaaatggtttgcaccattgacatttatcacccgtgcctgctgctttaccccctgcctgaatgggaaattatcgagcaaaaattatcgcgtctgtcgagcatgaacccggttgagcgccgtgtgcagcgcctactgttaggtcatgccagcgaatgtcagatggatggcgcaggtcgattgttaatcgcgccagtactgcggcaacatgccgggctgacaaaagaagtgatgctggttggacagttcaacaagtttgagctgtgggatgaaacaacctggcatcaacaggtcaaggaagatatcgacgcagagcagttggctaccggagacttatcggagcgactgcaggacttgtctctataaaatgatggaaaactataaacatactacggtgctgctggatgaagccgttaatggcctcaatatccgtcctgatggcatctacattgatgggacttttggtcgcggtggtcactcacgtctgatcctctcgcagcttggcgaagaggggcgtttgctggcgatcgatcgcgacccgcaggctatcgccgttgcgaagactattgatgatccgcgcttctccatcatccacggacctttctccgcgctgggcgaatacgttgccgagcgcgatcttatcggcaagatcgacggcattctcctcgatcttggcgtctcttcaccgcaacttgatgatgctgaacgtggcttttcctttatgcgcgatggtccgctggacatgcgtatggacccaacccgtgggcagtcagccgctgaatggctacaaaccgcagaagaagccgatatcgcctgggtattgaaaacctatggtgaagagcgttttgccaaacgcattgcccgcgccattgtcgagcgtaaccgcgaacagccgatgacccgcaccaaagaactggcggaagtcgtggctgctgcaacgccggtgaaagataagtttaaacatcccgcgacccgtaccttccaggcggtgcgcatttgggtaaacagtgaactggaggagatagagcaggcgctaaaaagctcgctcaacgtgctggccccgggtgggcggctttcgatcatcagcttccactcgctggaagaccgtattgtgaaacgttttatgcgtgaaaacagccgcggtccgcaagttccggcagggttaccgatgactgaagagcagctcaaaaaactgggtggccgtcagctgcgagcactaggcaagttaatgccgggcgaagaagaggtggctgagaaccctcgtgcccgtagttcagttctgcgtattgcagagaggacgaatgcatgatcagcagagtgacagaagctctaagcaaagttaaaggatcgatgggaagccacgagcgccatgcattgcctggtgttatcggtgacgatcttttgcgatttgggaagctgccactctgcctgttcatttgcattattttgacggcggtgactgtggtaaccacggcgcaccatacccgtttactgaccgctcagcgcgaacaactggtgctggagcgagatgctttagacattgaatggcgcaacctgatccttgaagagaatgcgctcggcgaccatagccgggtggaaaggatcgccacggaaaagctgcaaatgcagcatgttgatccgtcacaagaaaatatcgtagtgcaaaaataaggataaacgcgacgcatgaaagcagcggcgaaaacgcagaaaccaaaacgtcaggaagaacatgccaactttatcagttggcgttttgcgttgttatgcggctgtattctcctggcgctggcttttctgctcggacgcgtagcgtggttacaagttatctccccggatatgctggtgaaagagggcgacatgcgttctcttcgcgttcagcaagtttccacctcccgcggcatgattactgaccgttctggtcgcccgttagcggtgagcgtgccggtaaaagcgatttgggctgacccgaaagaagtgcatgacgctggcggtatcagcgtcggtgaccgctggaaggcgctggctaacgcgctcaatattccgctggatcagctttcagcccgcattaacgccaacccgaaagggcgctttatttatctggcgcgtcaggtgaaccctgacatggcggactacatcaaaaaactgaaactgccggggattcatctgcgtgaagagtctcgccgttactatccgtccggcgaagtgactgctcacctcatcggctttactaacgtcgatagtcaagggattgagggcgttgagaagagtttcgataaatggcttaccgggcagccgggtgagcgcattgtgcgtaaagaccgctatggtcgcgtaattgaagatatttcttctactgacagccaggcagcgcacaacctggcgctgagtattgatgaacgcctgcaggcgctggtttatcgcgaactgaacaacgcggtggcctttaacaaggctgaatctggtagcgccgtgctggtggatgtcaacaccggtgaagtgctggcgatggctaacagcccgtcatacaaccctaacaatctgagcggcacgccgaaagaggcgatgcgtaaccgtaccatcaccgacgtgtttgaaccgggctcaacggttaaaccgatggtggtaatgaccgcgttgcaacgtggcgtggtgcgggaaaactcggtactcaataccattccttatcgaattaacggccacgaaatcaaagacgtggcacgctacagcgaattaaccctgaccggggtattacagaagtcgagtaacgtcggtgtttccaagctggcgttagcgatgccgtcctcagcgttagtagatacttactcacgttttggactgggaaaagcgaccaatttggggttggtcggagaacgcagtggcttatatcctcaaaaacaacggtggtctgacatagagagggccaccttctctttcggctacgggctaatggtaacaccattacagttagcgcgagtctacgcaactatcggcagctacggcatttatcgcccactgtcgattaccaaagttgaccccccggttcccggtgaacgtgtcttcccggaatccattgtccgcactgtggtgcatatgatggaaagcgtggcgctaccaggcggcggcggcgtgaaggcggcgattaaaggctatcgtatcgccattaaaaccggtaccgcgaaaaaggtcgggccggacggtcgctacatcaataaatatattgcttataccgcaggcgttgcgcctgcgagtcagccgcgcttcgcgctggttgttgttatcaacgatccgcaggcgggtaaatactacggcggcgccgtttccgcgccggtctttggtgccatcatgggcggcgtattgcgtaccatgaacatcgagccggatgcgctgacaacgggcgataaaaatgaatttgtgattaatcaaggcgaggggacaggtggcagatcgtaatttgcgcgaccttcttgctccgtgggtgccagacgcaccttcgcgagcactgcgagagatgacactcgacagccgtgtggctgcggcgggcgatctctttgtagctgtagtaggtcatcaggcggacgggcgtcgatatatcccgcaggcgatagcgcaaggtgtggctgccattattgcagaggcgaaagatgaggcgaccgatggtgaaatccgtgaaatgcacggcgtaccggtcatctatctcagccagctcaacgagcgtttatctgcactggcgggccgcttttaccatgaaccctctgacaatttacgtctcgtgggcgtaacgggcaccaacggcaaaaccacgactacccagctgttggcgcagtggagccaactgcttggcgaaaccagcgcggtaatgggcaccgttggtaacggcctgctggggaaagtgatcccgacagaaaatacaaccggttcggcagtcgatgttcagcatgagctggcggggctggtggatcagggcgcgacgttttgcgcaatggaagtttcctcccacgggctggtacagcaccgtgtggcggcattgaaatttgcggcgtcggtctttaccaacttaagccgcgatcaccttgattatcatggtgatatggaacactacgaagccgcgaaatggctgctttattctgagcatcattgcggtcaggcgattattaacgccgacgatgaagtgggccgccgctggctggcaaaactgccggacgcggttgcggtatcaatggaagatcatattaatccgaactgtcacggacgctggttgaaagcgaccgaagtgaactatcacgacagcggtgcgacgattcgctttagctcaagttggggcgatggcgaaattgaaagccatctgatgggcgcttttaacgtcagcaacctgctgctcgcgctggcgacactgttggcactcggctatccactggctgatctgctgaaaaccgccgcgcgtctgcaaccggtttgcggacgtatggaagtgttcactgcgccaggcaaaccgacggtggtggtggattacgcgcatacgccggatgcactggaaaaagccttacaggcggcgcgtctgcactgtgcgggcaagctgtggtgtgtctttggctgtggtggcgatcgcgataaaggtaagcgtccactgatgggcgcaattgccgaagagtttgctgacgtggcggtggtgacggacgataacccgcgtaccgaagaaccgcgtgccatcatcaacgatattctggcgggaatgttagatgccggacatgccaaagtgatggaaggccgtgctgaagcggtgacttgcgccgttatgcaggctaaagagaatgatgtggtactggtcgcgggcaaaggccatgaagattaccagattgttggcaatcagcgtctggactactccgatcgcgtcacggtggcgcgtctgctgggggtgattgcatgattagcgtaacccttagccaacttaccgacattctcaacggtgaactgcaaggtgcagatatcacccttgatgctgtaaccactgatacccgaaaactgacgccgggctgcctgtttgttgccctgaaaggcgaacgttttgatgcccacgattttgccgaccaggcgaaagctggcggcgcaggcgcactactggttagccgtccgctggacatcgacctgccgcagttaatcgtcaaggatacgcgtctggcgtttggtgaactggctgcatgggttcgccagcaagttccggcgcgcgtggttgctctgacggggtcctccggcaaaacctccgttaaagagatgacggcggcgattttaagccagtgcggcaacacgctttatacggcaggcaatctcaacaacgacatcggtgtaccgatgacgctgttgcgcttaacgccggaatacgattacgcagttattgaacttggcgcgaaccatcagggcgaaatagcctggactgtgagtctgactcgcccggaagctgcgctggtcaacaacctggcagcggcgcatctggaaggttttggctcgcttgcgggtgtcgcgaaagcgaaaggtgaaatctttagcggcctgccggaaaacggtatcgccattatgaacgccgacaacaacgactggctgaactggcagagcgtaattggctcacgcaaagtgtggcgtttctcacccaatgccgccaacagcgatttcaccgccaccaatatccatgtgacctcgcacggtacggaatttaccctacaaaccccaaccggtagcgtcgatgttctgctgccgttgccggggcgtcacaatattgcgaatgcgctggcagccgctgcgctctccatgtccgtgggcgcaacgcttgatgctatcaaagcggggctggcaaatctgaaagctgttccaggccgtctgttccccatccaactggcagaaaaccagttgctgctcgacgactcctacaacgccaatgtcggttcaatgactgcagcagtccaggtactggctgaaatgccgggctaccgcgtgctggtggtgggcgatatggcggaactgggcgctgaaagcgaagcctgccatgtacaggtgggcgaggcggcaaaagctgctggtattgaccgcgtgttaagcgtgggtaaacaaagccatgctatcagcaccgccagcggcgttggcgaacattttgctgataaaactgcgttaattacgcgtcttaaattactgattgctgagcaacaggtaattacgattttagttaagggttcacgtagtgccgccatggaagaggtagtacgcgctttacaggagaatgggacatgttagtttggctggccgaacatttggtcaaatattattccggctttaacgtcttttcctatctgacgtttcgcgccatcgtcagcctgttgaccgcgctgttcatctcattgtggatgggcccgcgtatgattgctcatttgcaaaaactttcctttggtcaggtggtgcgtaacgacggtcctgaatcacacttcagcaagcgcggtacgccgaccatgggcgggattatgatcctgacggcgattgtgatctccgtactgctgtgggcttacccgtccaatccgtacgtctggtgcgtgttggtggtgctggtaggttacggtgttattggctttgttgatgattatcgcaaagtggtgcgtaaagacaccaaagggttgatcgctcgttggaagtatttctggatgtcggtcattgcgctgggtgtcgccttcgccctgtaccttgccggcaaagacacgcccgcaacgcagctggtggtcccattctttaaagatgtgatgccgcagctggggctgttctacattctgctggcttacttcgtcattgtgggtactggcaacgcggtaaacctgaccgatggtctcgacggcctggcaattatgccgaccgtatttgtcgccggtggttttgcgctggtggcgtgggcgaccggcaatatgaactttgccagctacttgcatataccgtatctgcgacacgccggggaactggttattgtctgtaccgcgatagtcggggcaggactgggcttcctgtggtttaacacctatccggcgcaggtctttatgggcgatgtaggttcgctggcgttaggtggtgcgttaggcattatcgccgtactgctacgtcaggaattcctgctggtgattatggggggcgtgttcgtggtagaaacgctttctgtcatcctgcaggtcggctcctttaaactgcgcggacaacgtattttccgcatggcaccgattcatcaccactatgaactgaaaggctggccggaaccgcgcgtcattgtgcgtttctggattatttcgctgatgctggttctgattggtctggcaacgctgaaggtacgttaatcatggctgattatcagggtaaaaatgtcgtcattatcggcctgggcctcaccgggctttcctgcgtggactttttcctcgctcgcggtgtgacgccgcgcgttatggatacgcgtatgacaccgcctggcctggataaattacccgaagccgtagaacgccacacgggcagtctgaatgatgaatggctgatggcggcagatctgattgtcgccagtcccggtattgcactggcgcatccatccttaagcgctgccgctgatgccggaatcgaaatcgttggcgatatcgagctgttctgtcgcgaagcacaagcaccgattgtggcgattaccggttctaacggcaaaagcacggtcaccacgctagtgggtgaaatggcgaaagcggcgggggttaacgttggtgtgggtggcaatattggcctgcctgcgttgatgctactggatgatgagtgtgaactgtacgtgctggaactgtcgagcttccagctggaaaccacctccagcttacaggcggtagcagcgaccattctgaacgtgactgaagatcatatggatcgctatccgtttggtttacaacagtatcgtgcagcaaaactgcgcatttacgaaaacgcgaaagtttgcgtggttaatgctgatgatgccttaacaatgccgattcgcggtgcggatgaacgctgcgtcagctttggcgtcaacatgggtgactatcacctgaatcatcagcagggcgaaacctggctgcgggttaaaggcgagaaagtgctgaatgtgaaagagatgaaactttccgggcagcataactacaccaatgcgctggcggcgctggcgctggcagatgctgcagggttaccgcgtgccagcagcctgaaagcgttaaccacattcactggtctgccgcatcgctttgaagttgtgctggagcataacggcgtacgttggattaacgattcgaaagcgaccaacgtcggcagtacggaagcggcgctgaatggcctgcacgtagacggcacactgcatttgttgctgggtggcgatggtaaatcggcggactttagcccactggcgcgttacctgaatggcgataacgtacgtctgtattgtttcggtcgtgacggcgcgcagctggcggcgctacgcccggaagtggcagaacaaaccgaaactatggaacaggcgatgcgcttgctggctccgcgtgttcagccgggcgatatggttctgctctccccagcctgtgccagccttgatcagttcaagaactttgaacaacgaggcaatgagtttgcccgtctggcgaaggagttaggttgatgcgtttatctctccctcgcctgaaaatgccgcgcctgccaggattcagtatcctggtctggatctccacggcgctaaagggctgggtgatgggctcgcgggaaaaagataccgacagcctgatcatgtacgatcgcaccttactgtggctgaccttcggcctcgcggcgattggctttatcatggtgacctcggcgtcaatgcccatagggcaacgcttaaccaacgatccgttcttcttcgcgaagcgtgatggtgtctatctgattttggcgtttattctggcgatcattacgctgcgtctgccgatggagttctggcaacgctacagtgccacgatgctgctcggatctatcatcctgctgatgatcgtcctggtagtgggtagctcggttaaaggggcatcgcgttggatcgatctcggtttgctgcgtatccagcctgcggagctgacaaaactgtcgctgttttgctatatcgccaactatctggtgcgtaaaggcgacgaagtacgtaataacctgcgcggcttcctgaaaccgatgggcgtgattctggtgttggcagtgttactgctggcacagccagaccttggtacggtggtggtgttgtttgtgactacgctggcgatgttgttcctggcgggagcgaaattgtggcagttcattgccattatcggtatgggcatttcagcggttgtgttgctgatactcgccgaaccgtaccgtatccgccgtgttaccgcattctggaacccgtgggaagatccctttggcagcggctatcagttaacgcaatcgctgatggcgtttggtcgcggcgaactttgggggcaaggtttaggtaactcggtacaaaaactggagtatctgccggaagcgcacactgactttattttcgccattatcggcgaagaactggggtatgtcggtgtggtgctggcacttttaatggtattcttcgtcgcttttcgcgcgatgtcgattggccgtaaagcattagaaattgaccaccgtttttccggttttctcgcctgttctattggcatctggtttagcttccaggcgctggttaacgtaggcgcggcggcggggatgttaccgaccaaaggtctgacattgccgctgatcagttacggtggttcgagcttactgattatgtcgacagccatcatgatgctgttgcgtattgattatgaaacgcgtctggagaaagcgcaggcgtttgtacgaggttcacgatgagtggtcaaggaaagcgattaatggtgatggcaggcggaaccggtggacatgtattcccgggactggcggttgcgcaccatctaatggctcagggttggcaagttcgctggctggggactgccgaccgtatggaagcggacttagtgccaaaacatggcatcgaaattgatttcattcgtatctctggtctgcgtggaaaaggtataaaagcactgatagctgccccgctgcgtatcttcaacgcctggcgtcaggcgcgggcgattatgaaagcgtacaaacctgacgtggtgctcggtatgggaggctacgtgtcaggtccaggtggtctggccgcgtggtcgttaggcattccggttgtacttcatgaacaaaatggtattgcgggcttaaccaataaatggctggcgaagattgccaccaaagtgatgcaggcgtttccaggtgctttccctaatgcggaagtagtgggtaacccggtgcgtaccgatgtgttggcgctgccgttgccgcagcaacgtttggctggacgtgaaggtccggttcgtgtgctggtagtgggtggttctcagggcgcacgcattcttaaccagacaatgccgcaggttgctgcgaaactgggtgattcagtcactatctggcatcagagcggcaaaggttcgcaacaatccgttgaacaggcgtatgccgaagcggggcaaccgcagcataaagtgacggaatttattgatgatatggcggcggcgtatgcgtgggcggatgtcgtcgtttgccgctccggtgcgttaacggtgagtgaaatcgccgcggcaggactaccggcgttgtttgtgccgtttcaacataaagaccgccagcaatactggaatgcgctaccgctggaaaaagcgggcgcagccaaaattatcgagcagccacagcttagcgtggatgctgtcgccaacaccctggccgggtggtcgcgagaaaccttattaaccatggcagaacgcgcccgcgctgcatccattccggatgccaccgagcgagtggcaaatgaagtgagccgggttgcccgggcgtaattgtagcgatgccttttgcatcgtatgaatttaagaagttaatggcgtaaagaatgaatacacaacaattggcaaaactgcgttccatcgtgcccgaaatgcgtcgcgttcggcacatacattttgtcggcattggtggtgccggtatgggcggtattgccgaagttctggccaatgaaggttatcagatcagtggttccgatttagcgccaaatccggtcacgcagcagttaatgaatctgggtgcgacgatttatttcaaccatcgcccggaaaacgtacgtgatgccagcgtggtcgttgtttccagcgcgatttctgccgataacccggaaattgtcgccgctcatgaagcgcgtattccggtgatccgtcgtgccgaaatgctggctgagttaatgcgttttcgtcatggcatcgccattgccggaacgcacggcaaaacgacaaccaccgcgatggtttccagcatctacgcagaagcggggctcgacccaaccttcgttaacggcgggctggtaaaagcggcgggggttcatgcgcgtttggggcatggtcggtacctgattgccgaagcagatgagagtgatgcatcgttcctgcatctgcaaccgatggtggcgattgtcaccaatatcgaagccgaccacatggatacctaccagggcgactttgagaatttaaaacagacttttattaattttctgcacaacctgccgttttacggtcgtgcggtgatgtgtgttgatgatccggtgatccgcgaattgttaccgcgagtggggcgtcagaccacgacttacggcttcagcgaagatgccgacgtgcgtgtagaagattatcagcagattggcccgcaggggcactttacgctgctgcgccaggacaaagagccgatgcgcgtcaccctgaatgcgccaggtcgtcataacgcgctgaacgccgcagctgcggttgcggttgctacggaagagggcattgacgacgaggctattttgcgggcgcttgaaagcttccaggggactggtcgccgttttgatttcctcggtgaattcccgctggagccagtgaatggtaaaagcggtacggcaatgctggtcgatgactacggccaccacccgacggaagtggacgccaccattaaagcggcgcgcgcaggctggccggataaaaacctggtaatgctgtttcagccgcaccgttttacccgtacgcgcgacctgtatgatgatttcgccaatgtgctgacgcaggttgataccctgttgatgctggaagtgtatccggctggcgaagcgccaattccgggagcggacagccgttcgctgtgtcgcacaattcgtggacgtgggaaaattgatcccattctggtgccggatccggcgcgggtagccgagatgctggcaccggtattaaccggtaacgacctgattctcgttcagggggctggtaatattggaaaaattgcccgttctttagctgaaatcaaactgaagccgcaaactccggaggaagaacaacatgactgataaaatcgcggtcctgttgggtgggacctccgctgagcgggaagtttctctgaattctggcgcagcggtgttagccggactgcgtgaaggcggtattgacgcgtatcctgtcgacccgaaagaagtcgacgtgacgcaactgaagtcgatgggctttcagaaagtgtttatcgcgctacacggtcgcggcggtgaagatggtacgctgcaggggatgctcgagctgatgggcttgccttataccggaagcggagtgatggcatctgcgctttcaatggataaactacgcagcaaacttctatggcaaggtgccggtttaccggtcgcgccgtgggtagcgttaacccgcgcagagtttgaaaaaggcctgagcgataagcagttagcagaaatttctgctctgggtttgccggttatcgttaagccgagccgcgaaggttccagtgtgggaatgtcaaaagtagtagcagaaaatgctctacaagatgcattaagattggcatttcagcacgatgaagaagtattgattgaaaaatggctaagtgggccggagttcacggttgcgatactcggtgaagaaattttaccgtcaatacgtattcaaccgtccggaaccttctatgattatgaggcgaagtatctctctgatgagacacagtatttctgccccgcaggtctggaagcgtcacaagaggccaatttgcaggcattagtgctgaaagcatggacgacgttaggttgcaaaggatggggacgtattgacgttatgctggacagcgatggacagttttatctgctggaagccaatacctcaccgggtatgaccagccacagcctggtgccgatggcggcacgtcaggcaggtatgagcttctcgcagttggtagtacgaattctggaactggcggactaatatgtcgcaggctgctctgaacacgcgaaacagcgaagaagaggtttcttctcgccgcaataatggaacgcgtctggcggggatccttttcctgctgaccgttttaacgacagtgttggtgagcggctgggtcgtgttgggctggatggaagatgcgcaacgcctgccgctctcaaagctggtgttgaccggtgaacgccattacacacgtaatgacgatatccggcagtcgatcctggcattgggtgagccgggtacctttatgacccaggatgtcaacatcatccagacgcaaatagaacaacgcctgccgtggattaagcaggtgagcgtcagaaagcagtggcctgatgaattgaagattcatctggttgaatatgtgccgattgcgcggtggaatgatcaacatatggtagacgcggaaggaaataccttcagcgtgccgccagaacgcaccagcaagcaggtgcttccaatgctgtatggcccggaaggcagcgccaatgaagtgttgcagggctatcgcgaaatggggcagatgctggcaaaggacagatttactctgaaggaagcggcgatgaccgcgcggcgttcctggcagttgacgctgaataacgatattaagctcaatcttggccggggcgatacgatgaaacgtttggctcgctttgtagaactttatccggttttacagcagcaggcgcaaaccgatggcaaacggattagctacgttgatttgcgttatgactctggagcggcagtaggctgggcgcccttgccgccagaggaatctactcagcaacaaaatcaggcacaggcagaacaacaatgatcaaggcgacggacagaaaactggtagtaggactggagattggtaccgcgaaggttgccgctttagtaggggaagttctgcccgacggtatggtcaatatcattggcgtgggcagctgcccgtcgcgtggtatggataaaggcggggtgaacgacctcgaatccgtggtcaagtgcgtacaacgcgccattgaccaggcagaattgatggcagattgtcagatctcttcggtatatctggcgctttctggtaagcacatcagctgccagaatgaaattggtatggtgcctatttctgaagaagaagtgacgcaagaagatgtggaaaacgtcgtccataccgcgaaatcggtgcgtgtgcgcgatgagcatcgtgtgctgcatgtgatcccgcaagagtatgcgattgactatcaggaagggatcaagaatccggtaggactttcgggcgtgcggatgcaggcaaaagtgcacctgatcacatgtcacaacgatatggcgaaaaacatcgtcaaagcggttgaacgttgtgggctgaaagttgaccaactgatatttgccggactggcatcaagttattcggtattgacggaagatgaacgtgaactgggtgtctgcgtcgtcgatatcggtggtggtacaatggatatcgccgtttataccggtggggcattgcgccacactaaggtaattccttatgctggcaatgtcgtgaccagtgatatcgcttacgcctttggcacgccgccaagcgacgccgaagcgattaaagttcgccacggttgtgcgctgggttccatcgttggaaaagatgagagcgtggaagtgccgagcgtaggtggtcgtccgccacggagtctgcaacgtcagacactggcagaggtgatcgagccgcgctataccgagctgctcaacctggtcaacgaagagatattgcagttgcaggaaaagcttcgccaacaaggggttaaacatcacctggcggcaggcattgtattaaccggtggcgcagcgcagatcgaaggtcttgcagcctgtgctcagcgcgtgtttcatacgcaagtgcgtatcggcgcgccgctgaacattaccggtttaacggattatgctcaggagccgtattattcgacggcggtgggattgcttcactatgggaaagagtcacatcttaacggtgaagctgaagtagaaaaacgtgttacagcatcagttggctcgtggatcaagcgactcaatagttggctgcgaaaagagttttaatttttatgaggccgacgatgattacggcctcaggcgacaggcacaaatcggagagaaactatgtttgaaccaatggaacttaccaatgacgcggtgattaaagtcatcggcgtcggcggcggcggcggtaatgctgttgaacacatggtgcgcgagcgcattgaaggtgttgaattcttcgcggtaaataccgatgcacaagcgctgcgtaaaacagcggttggacagacgattcaaatcggtagcggtatcaccaaaggactgggcgctggcgctaatccagaagttggccgcaatgcggctgatgaggatcgcgatgcattgcgtgcggcgctggaaggtgcagacatggtctttattgctgcgggtatgggtggtggtaccggtacaggtgcagcaccagtcgtcgctgaagtggcaaaagatttgggtatcctgaccgttgctgtcgtcactaagcctttcaactttgaaggcaagaagcgtatggcattcgcggagcaggggatcactgaactgtccaagcatgtggactctctgatcactatcccgaacgacaaactgctgaaagttctgggccgcggtatctccctgctggatgcgtttggcgcagcgaacgatgtactgaaaggcgctgtgcaaggtatcgctgaactgattactcgtccgggtttgatgaacgtggactttgcagacgtacgcaccgtaatgtctgagatgggctacgcaatgatgggttctggcgtggcgagcggtgaagaccgtgcggaagaagctgctgaaatggctatctcttctccgctgctggaagatatcgacctgtctggcgcgcgcggcgtgctggttaacatcacggcgggcttcgacctgcgtctggatgagttcgaaacggtaggtaacaccatccgtgcatttgcttccgacaacgcgactgtggttatcggtacttctcttgacccggatatgaatgacgagctgcgcgtaaccgttgttgcgacaggtatcggcatggacaaacgtcctgaaatcactctggtgaccaataagcaggttcagcagccagtgatggatcgctaccagcagcatgggatggctccgctgacccaggagcagaagccggttgctaaagtcgtgaatgacaatgcgccgcaaactgcgaaagagccggattatctggatatcccagcattcctgcgtaagcaagctgattaagaattgactggaatttgggtttcgaggctctttgtgctaaactggcccgccgaatgtatagtacacttcggttggataggtaatttggcgagataatacgatgatcaaacaaaggacacttaaacgtatcgttcaggcgacgggtgtcggtttacataccggcaagaaagtcaccctgacgttacgccctgcgccggccaacaccggggtcatctatcgtcgcaccgacttgaatccaccggtagatttcccggccgatgccaaatctgtgcgtgataccatgctctgtacgtgtctggtcaacgagcatgatgtacggatttcaaccgtagagcacctcaatgctgctctcgcgggcttgggcatcgataacattgttatcgaagttaacgcgccggaaatcccgatcatggacggcagcgccgctccgtttgtatacctgctgcttgacgccggtatcgacgagttgaactgcgccaaaaaatttgttcgcatcaaagagactgttcgtgtcgaagatggcgataagtgggctgaatttaagccgtacaatggtttttcgctggatttcaccatcgattttaaccatccggctattgattccagcaaccagcgctatgcgatgaacttctccgctgatgcgtttatgcgccagatcagccgtgcgcgtacgttcggtttcatgcgtgatatcgaatatctgcagtcccgtggtttgtgcctgggcggcagcttcgattgtgccatcgttgttgacgattatcgcgtactgaacgaagacggcctgcgttttgaagacgaatttgtgcgtcacaaaatgctcgatgcgatcggtgacttgttcatgtgtggtcacaatattattggtgcatttaccgcttataaatccggtcatgcactgaataacaaactgctgcaggctgtcctggcgaaacaggaagcctgggaatatgtgaccttccaggacgacgcagaactgccgttggccttcaaagcgccttcagctgtactggcataacgacatttatactgtcgtataaaattcgactggcaaatctggcactctctccggccaggtgaaccagtcgtttttttttgaattttataagagctataaaaaacggtgcgaacgctgttttcttaagcacttttccgcacaacttatcttcattcgtgctgtggactgcaggctttaatgataagatttgtgcgctaaatacgtttgaatatgatcgggatggcaataacgtgagtggaatactgacgcgctggcgacagtttggtaaacgctacttctggccgcatctcttattagggatggttgcggcgagtttaggtttgcctgcgctcagcaacgccgccgaaccaaacgcgcccgcaaaagcgacaacccgcaaccacgagccttcagccaaagttaactttggtcaattggccttgctggaagcgaacacacgccgcccgaattcgaactattccgttgattactggcatcaacatgccattcgcacggtaatccgtcatctttctttcgcaatggcaccgcaaacactgcccgttgctgaagaatctttgcctcttcaggcgcaacatcttgcattactggatacgctcagcgcgctgctgacccaggaaggcacgccgtctgaaaagggttatcgcattgattatgcgcattttaccccacaagcaaaattcagcacgcccgtctggataagccaggcgcaaggcatccgtgctggccctcaacgcctcacctaacaacaataaacctttacttcattttattaactccgcaacgcggggcgtttgagattttattatgctaatcaaattgttaactaaagttttcggtagtcgtaacgatcgcaccctgcgccggatgcgcaaagtggtcaacatcatcaatgccatggaaccggagatggaaaaactctccgacgaagaactgaaagggaaaaccgcagagtttcgtgcacgtctggaaaaaggcgaagtgctggaaaatctgatcccggaagctttcgccgtggtacgtgaggcaagtaagcgcgtctttggtatgcgtcacttcgacgttcagttactcggcggtatggttcttaacgaacgctgcatcgccgaaatgcgtaccggtgaaggaaaaaccctgaccgcaacgctgcctgcttacctgaacgcactaaccggtaaaggcgtgcacgtagttaccgtcaacgactacctggcgcaacgtgacgccgaaaacaaccgtccgctgtttgaattccttggcctgactgtcggtatcaacctgccgggcatgccagcaccggcaaagcgcgaagcttacgcagctgacatcacttacggtacgaacaacgaatacggctttgactacctgcgcgacaacatggcgttcagccctgaagaacgtgtacagcgtaaactgcactatgcgctggtggacgaagtggactccatcctgatcgatgaagcgcgtacaccgctgatcatttccggcccggcagaagacagctcggaaatgtataaacgcgtgaataaaattattccgcacctgatccgtcaggaaaaagaagactccgaaaccttccagggcgaaggccacttctcggtggacgaaaaatctcgccaggtgaacctgaccgaacgtggtctggtgctgattgaagaactgctggtgaaagagggcatcatggatgaaggggagtctctgtactctccggccaacatcatgctgatgcaccacgtaacggcggcgctgcgcgctcatgcgctgtttacccgtgacgtcgactacatcgttaaagatggtgaagttatcatcgttgacgaacacaccggtcgtaccatgcagggccgtcgctggtccgatggtctgcaccaggctgtggaagcgaaagaaggtgtgcagatccagaacgaaaaccaaacgctggcttcgatcaccttccagaactacttccgtctgtatgaaaaactggcggggatgaccggtactgctgataccgaagctttcgaatttagctcaatctacaagctggataccgtcgttgttccgaccaaccgtccaatgattcgtaaagatctgccggacctggtctacatgactgaagcggaaaaaattcaggcgatcattgaagatatcaaagaacgtactgcgaaaggccagccggtgctggtgggtactatctccatcgaaaaatcggagctggtgtcaaacgaactgaccaaagccggtattaagcacaacgtcctgaacgccaaattccacgccaacgaagcggcgattgttgctcaggcaggttatccggctgcggtgactatcgcgaccaatatggcgggtcgtggtacagatattgtgctcggtggtagctggcaggcagaagttgccgcgctggaaaatccgaccgcagagcaaattgaaaaaattaaagccgactggcaggtacgtcacgatgcggtactggaagcaggtggcctgcatatcatcggtaccgagcgtcacgaatcccgtcgtatcgataaccagttgcgcggtcgttctggtcgtcagggggatgctggttcttcccgtttctacctgtcgatggaagatgcgctgatgcgtatttttgcttccgaccgagtatccggcatgatgcgtaaactgggtatgaagccaggcgaagccattgaacacccgtgggtgactaaagcgattgccaacgcccagcgtaaagttgaaagccgtaacttcgacattcgtaagcaactgctggaatatgatgacgtggctaacgatcagcgtcgcgccatttactcccagcgtaacgaactgttggatgtcagcgatgtgagcgaaaccattaacagcattcgtgaagatgtgttcaaagcgaccattgatgcctacattccaccacagtcgctggaagaaatgtgggatattccggggctgcaggaacgtctgaagaacgatttcgacctcgatttgccaattgccgagtggctggataaagaaccagaactgcatgaagagacgctgcgtgagcgcattctggcgcagtccatcgaagtgtatcagcgtaaagaagaagtggttggtgctgagatgatgcgtcacttcgagaaaggcgtcatgctgcaaacgcttgactccctgtggaaagagcacctggcagcgatggactatctgcgtcagggtatccacctgcgtggctacgcacagaaagatccgaagcaggaatacaaacgtgaatcgttctccatgtttgcagcgatgctggagtcgttgaaatatgaagttatcagtacgctgagcaaagttcaggtacgtatgcctgaagaggttgaggagctggaacaacagcgtcgtatggaagccgagcgtttagcgcaaatgcagcagcttagccatcaggatgacgactctgcagccgcagctgcactggcggcgcaaaccggagagcgcaaagtaggacgtaacgatccttgcccgtgcggttctggtaaaaaatacaagcagtgccatggccgcctgcaataaaagctaactgttgaagtaaaaggcgcaggattctgcgccttttttataggtttaagacaatgaaaaagctgcaaattgcggtaggtattattcgcaacgagaacaatgaaatctttataacgcgtcgcgcagcagatgcgcacatggcgaataaactggagtttcccggcggtaaaattgaaatgggtgaaacgccggaacaggcggtggtgcgtgaacttcaggaagaagtcgggattaccccccaacatttttcgctatttgaaaaactggaatatgaattcccggacaggcatataacactgtggttttggctggtcgaacgctgggaaggggagccgtggggtaaagaagggcaacccggtgagtggatgtcgctggtcggtcttaatgccgatgattttccgccagccaatgaaccggtaattgcgaagcttaaacgtctgtaggtcagataaggcgttttcgccgcatccgacattcgcacacgatgcctgatgcgacgctggcgcgtcttatcaggcctaaagggatttctaactcattgataaatttgtttttgtaggtcggataaggcgttcacgccgcatctgacatttgcacaagatgcctgatgcgacgctgtccgcgtcttatcaggcctacgtgcggcatcagacaaatgtcactgctttggttcttcgctccagtcatcgctttcggaaagatcgccactgctggggattcgtttttcttcagcagcccattctccgaggtcgatcagctgacaacgtttggagcaaaatggccgaaacgggctgatttcaccccacaccaccgttttcccgcaggttgggcaattcaccgtaatagtttctgacatttttactccttagcaacaggccagttcgaaatccagacgttccggtacctgtccgttttcagtgtccagcggcataaaacgaatggcaaaacggctcttatgtccggaaatttgcggataaagctgtgaatcgagcgacagattcaggcgcagcaagtcggcatcgccaccgttatcctgataaaaaccattcaggctggtttgtttacggaagggggccgactggcgaattaaatccagcaccatggtaagtgcctgggtgagcgggttcaggctggcaatccaggtttctacctggctgtcgcgctgcgcctggggtagatgcagccaaatgtgcaatgtaggtaaatcaaagctgcaacagccgcctgggatgctcagtcgctgacgcaccagagcaatcaaacgatcttcacgcagaaattgcccgatacgcggcgcggaaattaatacgctccccgccgcttttaactgctgaattaatgcttcaatacggctctggtccacgccaggcacgccaatccaggtctggagtttacgttgctgccggtcaagttctttcaacagctcagtgcggacttcgccgcgctcgaaaacatccagtaattcactgacattacggaagaaatgcagcgcgccagcgtggtcaacgatgggtaaattaacggtgagttgctgaatcaaaaactcaatgcgcagccatgtacgcattttttcatttagtggatgttcaaaaaggacctgggtctgcattacggtttttcctgtgagacaaactgcgacgcaagctgcaaatagtgtgcgtgcaggcgggcaacatccgatgcgatagcatccggtgcgccgttattatcaatgacgtcatctgccacggcaaggcgggcttcgcgcgttgcctgagcagcaaggatttgttcgacatgctcgcgagttacatcatcgcgctgcatggtgcgcttaagttgcgtttctgggctgacatccaccacaagcactcgattcgcttttttatacagtgagttttctaccagcaatggcacaacccacagtacatagggggaagtagcttgctggatctggtgttgcgtctcttgctgaatcagcggatgcagcagggcgttaagccagtttttctcttccgggttggcgaagatccgctcgcgcaaggcccggcgctgcaatgttccatcagcagcaatcatgttagcgccaaagtgatcagcaatggcatgtagcgcaggtgcacctggttcaaccacctgacgcgcaataatatcggcatcaatgacgttaattccgagatcagcaaacgcattggcaacggtactcttgccactgccaatgcctcccgttaaggcaactatatacctcataatttatattcccgggaattcatcatgattatcaaaacgttaaaaatgagtgcacgaaagcgaaattgatgaaacgttcgctcactatttaccaggtaaatttatgggattgtagcgtaaaaaaagacaatttcgcagtcttgcgccgcattgattagtgcgtatgatagcgtcactggagttgcgctcttacccttatagccattaaccccaggaatccgcacatgcgtattgaagaagatctgaagttaggttttaaagacgttctcatccgccctaaacgctccactcttaaaagccgttccgatgttgaactggaacgtcaattcaccttcaaacattcaggtcagagctggtccggcgtgccgattatcgccgcaaatatggacaccgtaggcacattttctatggcctctgcgctggcttcttttgatattttgactgctgtgcataaacactattctgtcgaagagtggcaagcgtttatcaacaattcttccgctgatgtgctgaaacatgtgatggtttctaccggtacgtctgatgcggatttcgaaaaaactaaacagattctcgacctgaacccggcattaaacttcgtttgtattgacgtggcgaatggttattccgaacacttcgtgcagttcgttgcgaaagcgcgtgaagcgtggccgaccaaaaccatttgtgctggtaacgtagtgactggtgaaatgtgtgaggagcttatcctctcaggtgccgatatcgttaaagttggcattggcccaggttctgtttgtacaactcgcgtcaaaacaggcgtcggttatccgcaactttctgcggtaatcgaatgtgccgatgctgcgcacggtctgggcggaatgatcgtcagcgatggtggctgcaccacgccgggcgatgtggcgaaagcctttggcggcggtgccgatttcgtcatgcttggcggcatgctggcgggccacgaagagagcggcggtcgcatcgttgaggagaacggcgagaaatttatgctgttctacggcatgagctccgagtctgcgatgaaacgtcacgttggcggcgttgcggaatatcgcgcagcagaaggtaaaaccgttaagctgccgctgcgaggcccggttgaaaataccgcgcgagatattttgggcggcctgcgttcagcttgtacatacgttggggcttcacgcctgaaagagctgaccaagcgcaccacgtttattcgtgtgcaggaacaagaaaaccgcatcttcaacaacctgtaatctcccaacgctggcgtggagcaacacgccagcgttatcccatcccactcatcgcatcgcctaaatggaaaattggcagatacattgccaccaccagcgtaccaataattcctcccgttatgatcagcaacgccggttccagtaaggctgcgaggttatccgccagcgccattgtgttttcccgatgatgatgggcgaggttgtctaacatgagatccagagagccggatgcctctcctgttctcactaattgcaaacagagcgggctaaactcaccggtattttttagcgccagccagatgggttgaccgttactgatatcgtgctggatttgtgtcagaagttgcacccagtacgggcagcgcattgtttctctgacgctctctacgccctgtaaaaaagtaatgcctgcactttgtgtcagcgccagaatcgtaaagatctgcgtgagtttttgtccccgcatcagtgaacccataatcgggatgcgtaacagcaatttctgccgcactataagccaggtcggtcggcgcatcagcaacttattggctatcgccagcagaaagccgaacaacaccagcagccagctccattcgccactaaagtctgccagcgtcatgatcccctgcgttagtgccggtagtggggtgttgaaggtcttatagatagcggcaaactccggcagaacaaaatgcagcattgccacaaccaccatgattgccatcgctaaaatgatgatgggataacgtaacgctgatttcactttgtcggtcaactgacgctgggctttttgctgacgcgccagttcaaagcagcattcatccagcttaccggtcagttcacccgtgcggatcatcgcctgatagagcggcggaaatacctctgaccagggtaataaggcattggaaaaagcaatgccctgttcgagatcgtgcgccagcgattgcagcaacgcttgccattgcttactgggatgctgttccgccagcagagccagcccttcagaaagcgttaaccctgctttgagtagcgtcgccagttgatgaatgacttccgcgcttttatctcctcgccactgcgcagaattgatggcgattcgcttcaggcttagtggggtaaccatctgttgctgtagtgccataagcagtaaagtacggctctctgcccatagcatcccatcttgcgcattgccgtcgccggttatgccatgccagcgccagagttgcttactcgccatgcggcatccccagtacgcggattaactcttcaaaggtggttaagccttgctctacggccaggcagccgttttcaaaaagcgtacgcatacccgcctgtcgtgcgtgcgtttccagcgattcaacgtcggtattagcggaaataagctgacgaatgaccggcgttatgggcagaacttcaaataaggccgtacgaccataaaaaccgtggtagcaatgtacacaaccgggtgcctgccagtggggcagcggcgatggccatacattgtctggaatgtggatgggctccccttgctgccggcgacaatgtgggcaaagtttgcgtaccagacgctgggctattaccagcgtaagcgccgatgatagcatccagcgggcgacccccatttgctgtaaacgtaccagcgtttcgcaggtggaattagtgtgtagggtagacaacaccaggtgaccagtttgcgccgctttaatagcgatctctgctgtttcgccatcgcggatctctccgatcatgatgacgtcaggatcctggcgcaataacgcacgcaaaacgccctgaaaggtgagtccggcacgcggatggatttgcgtctggtttagtccggctatggggatctcaactggatcttcgacgctacaaatattaatgtcagcggtattcagcttttgcagggcactataaagcgtgaccgttttgccgctgccggtagggccagttaccagcaccagtccctgtggttgttgcaaggcatgagcaaagtccgccagttgtaacggctgcattccaagcgtgttgacatccagtgcctgacccacctgctgtaacaaccttaataccaccttttcaccaccccgacatggtaaggtcgcaatacgaaatgagacggcgtttcctgccagttcgacagtgaattgcccgtcctgcggcaggcgatgttccgcaatatccaggtttcccagcacttttaatctggcggttaatgcgactccggcatccggtgaaacatccggtaaaggatgcaatacgccgtcgatacgcaagcggatgcggtaggcattgtccgctggttcgatatgaatatcagacgcgcgttgttccagcgcagattgtaacgttcgagttagcaactctgctttgggctgatgcttctcctgaacagctacgggcaatgtctgttgtgtgcgactggcgtgaccttccatttgttggcgcgtccagcaggtgatctcaatacgtttggtggtagcgaaatgcaatgcgtccagtagctcatgcgaaggtgcatcgactaccgcaacatgaaccacctcttcgctggcatccagcaagactccatgataacgcagacacagggcagtgagctgtggaatattcattgccgctccttagttggcgtcatcaaagcggaagacatcttcgcaggcttgctgcaatgcgctgtcactttgaatattgcagttgcgcgtccagccggtgacgccgtttgcgttatcccaacccggtgtcatgacgacgcttagcccattgagactttcttgcccggtcagcgacaccacgccctttgccacactcatggctgaaacatagcgggtggtggtaggcgagggaatgccattgctgccaccgtcgcaggtatctaatccaccatgttccagcgcgcacaactctacggcggtacggtaaggcacaaaggtttgtagcatgtcggtgagtgcggctttgcgcaggtagttttgataagcgggaataccaatggcgcttaaaatggcaatgatgccaataaccaccatcagttcgataagtgtaaaaccgcgttgcttgtccatctgtttcgctccttgatttggttggcgctactttggcaaacgccatcagcacaggcgaggggcaaaaaacgaaacgggaaagcagattccgaggttttttatttcgttgcagcgaaagacaagaaatttgcgaggcgttacgaagaaagttggggaaggggagattatccgcccgcgatggagcggataaatctgtcaactattagcgaaaacgcattgaaaggtcgagtgcttgtacgtgtttagttagcgcaccgacggagataaagtccacgcccgtttcggcaaattcacgcagtgttttgtcagtgacgttgccagacacttccagtagcgccttgccgttggtgcgtttgacggcttcgcgcatctgttctgtttcgaagttatccagcatgatgatatcggctcctgctttcagggcttcatcaagttcttccagattctctacttcgacttctactggcgcatccgggtgcagccaggacgctttttcgaccgcctggcgcactgagccggaggcaataatatggttttctttgatcaggaaggcatcagaaagccccagacggtgattcgctccgccgccgcaaagtaccgcgtatttcagagctgaacgcaggccgggtaaggttttgcgcgtatccaacaactgcgtgttggtgccttccagcaattcgacatagtggcgtaccttactggcaactcctgaaagggtttgcacaaaattaagcgcagtgcgttcgcccgttaacagcacgcgggatgggccttcaagttcgaacaaggattgattggcattgatgacatcgccgtcatccacatgccagattatggtgacatcgtcgcctgccagttgaataaacacctcttcaacccagcgtttgccgcaaaagacgccattctcgcgggtgatcaccgtggcatgagagcgagaattttccggtaaaagttttgccgtaatatcattgttggcatcgactgttccgcctaaatcttcccgcagcgcctgggccaccgcgccggggatatcgagattaatgcgttccagcagctcgtcacgtcgggtgtcagggttatagcggcgaggcggcatgttaaaactccagatagctaacgaatcataaggtagaaacatgctactctgaaccgggtattagcaccacatataaggagatcctgcatgttgttagaacaggggtggctggttggcgcgcgccgcgttccctcaccacattacgattgccgcccggatgacgaaacacccaccctgctggtggtgcacaatattagcctgccgccaggcgagtttggcggtccgtggatcgacgcattattcactggaactattgatccgcaggcacatcctttctttgctgagatcgcccatttgcgcgtctccgctcactgtttgattcgccgtgatggtgaaatagtccagtatgttcctttcgataaacgtgcatggcatgcgggagtctctcagtatcaggggcgcgaacgctgcaatgatttttctattgggattgagcttgaaggcaccgatacgctggcgtataccgatgcgcagtatcaacagcttgcggcggttacgcgggcactgattgattgctatccggatatcgctaaaaacatgacgggccattgtgatattgcgccggatcggaaaaccgatcccggtcctgcatttgattgggcacggtttcgtgtgctggtcagcaaggagacaacatgacgctatttacaaccttactggtgttaattttcgagcgcctgtttaagttgggcgagcactggcagcttgatcatcgtcttgaagcgttctttcggcgggtgaaacatttttctctcgggcgcacgttaggcatgaccattattgcgatgggcgtgacttttttactgttacgcgcattgcagggagtattgttcaacgttcccacgctactggtgtggctgctgattggtttgctgtgtattggcgcaggtaaagttcgtcttcattatcatgcttatctgacagctgcttcacgtaatgatagccatgcccgtgccacgatggctggcgaactcaccatgattcacggcgtcccggcaggctgcgacgaacgtgagtatttgcgtgagctgcaaaatgcattgctgtggattaactttcgtttttatcttgcaccgctgttctggctgattgtggggggaacctggggacccgttacgctgatggggtatgcgtttttgcgtgcatggcaatactggctggcgcgatatcagacgccgcatcatcgtttacagtccggcattgatgccgtgcttcatgtactggattgggtgccggttcgtcttgcgggtgtggtatatgccttgatcggtcatggtgagaaagcgttaccggcctggtttgcttcgctgggtgatttccatacttcgcagtatcaggtgttaacgcgtctggcgcagttctctctggcgcgtgaaccgcatgtcgataaggtggagacgccgaaggcagcggtttcaatggcgaagaaaacctcgttcgtagtcgtggtggtgattgcactactgacgatttacggggcgttggtgtaaagattattgccctcaccctgtacgggtgagggcgtagagagattaatgcgcttttacggctttggcggttttctctttaaacagatagccgatacctaacacgatcagccataccgggatcaggtataccgaaatcgccattcctggggtcatcagcataatcaccagtaccgccgccataaacagcaggcagatccagttacccagcggataaagcagagcagggaagcgagttaccacgccttgttcctgcttggcgcgacggaatttcatatgcgccaggctaatcatcgcccagttgattaccagtgcagataccaccagcgccattaacagtccgaaagcggactctggggcaaggtagttaatcagtacgcacaacgccgttaccagtgcagacaccagaatggtatttactggtacaccacgtttatcgacagacgccagcgcttttggcgcattaccctgttgtgccagaccaaacagcatacggctgttgcaatatacgcagctgttgtacacggagagcgccgcagtcagtaccacgatgttcagcgcattcgccacaaaggtatcgcctaactcgtggaagatcagcacaaacggactggtatcggcggtaacgcgggtccacggcatcagtgagagcagaacggctaacgaaccaatatagaaaatcaggatgcggtagataacctggttagttgctttcggtatactttgctccgggttatcagcttctgctgcggtgatccccaccagttccagaccaccgaacgagaacatgataatcgccatcatcatcaccagcccggtgaagccgtgcggcaggaaaccaccctgatcccacaggttgctaacggtcgcctgcgggccgccgttgccactgaatagcagccagccgccgaagatgatcatcgctaccaccgcgataactttgataatggcaaaccagaactccatctcgccaaacactttaacgttggtcaggttgatggcgttaatcaccacaaagaatacggcggcagaaacccaggtggggatttccggataccagaactgaatgtatttacccacggcagtcagctcagccatggcaactaaaacgtacagtacccagtagttccagccagaggcgaaaccggcaaaactgccccagtatttataagcaaagtggctaaaggagcctgcgacaggttcttcgaccaccatttcacccagctgacgcatgatcagaaaggcgataaaaccagcaatggcgtaacccaggataatccctggccctgcggactgtattacggaggcgctacccaggaataacccggtccctatcgcgccacccagcgcgataagctgaatatggcggtttttaaggccgcgctttagctgctcgccgtgctgttgaccttccatcatgaaacctcgtgcggtggttgtttttttgatctacgcagtgatgcgtgtgtaagtttgcaattccgtttgttgtattaatttgtttacatcaaagaagtttgaattgttacaaaaagacttccgtcagatcaagaataatggtatgcggcagcgaatgcacccgctttatgcatggttgaagatgagttgcttaaaaagaaaccgtttgtaaagctcagcctcaacccctctcaatatgtagaatgaatttaaattcgttttaattgaattaaaaatcacaaaattggtaagtgaatcggttcaattcggatttttatagtttaataatcgttaaaaaactcctttcctacgtaaagtctacatttgtgcatagttacaactttgaaacgttatatatgtcaagttgttaaaatgtgcacagtttcatgatttcaatcaaaacctgtatggacataaggtgaatactttgttactttagcgtcacagacatgaaattggtaagaccaattgacttcggcaagtggcttaagacaggaactcatggcctacagcaaaatccgccaaccaaaactctccgatgtgattgagcagcaactggagtttttgatcctcgaaggcactctccgcccgggcgaaaaactcccaccggaacgcgaactggcaaaacagtttgacgtctcccgtccctccttgcgtgaggcgattcaacgtctcgaagcgaagggcttgttgcttcgtcgccagggtggcggcacttttgtccagagcagcctatggcaaagcttcagcgatccgctggtggagctgctctccgaccatcctgagtcacagtatgacttgctcgaaacacgacacgccctggaaggtatcgccgcttattacgccgcgctgcgtagtaccgatgaagacaaggaacgcatccgtgaactccaccacgccatagagctggcgcagcagtctggcgatctggacgcggaatcaaacgccgtactccagtatcagattgccgtcaccgaagcggcccacaatgtggttctgcttcatctgctaaggtgtatggagccgatgttggcccagaatgtccgccagaacttcgaattgctctattcgcgtcgcgagatgctgccgctggtgagtagtcaccgcacccgcatatttgaagcgattatggccggtaagccggaagaagcgcgcgaagcatcgcatcgccatctggcctttatcgaagaaattttgctcgacagaagtcgtgaagagagccgccgtgagcgttctctgcgtcgtctggagcaacgaaagaattagtgatttttctggtaaaaattatccagaagatgttgtaaatcaagcgcatataaaagcgcggcaactaaacgtagaacctgtcttattgagctttccggcgagagttcaatgggacaggttccagaaaactcaacgttattagatagataaggaataacccatgtcagaacgtttcccaaatgacgtggatccgatcgaaactcgcgactggctccaggcgatcgaatcggtcatccgtgaagaaggtgttgagcgtgctcagtatctgatcgaccaactgcttgctgaagcccgcaaaggcggtgtaaacgtagccgcaggcacaggtatcagcaactacatcaacaccatccccgttgaagaacaaccggagtatccgggtaatctggaactggaacgccgtattcgttcagctatccgctggaacgccatcatgacggtgctgcgtgcgtcgaaaaaagacctcgaactgggcggccatatggcgtccttccagtcttccgcaaccatttatgatgtgtgctttaaccacttcttccgtgcacgcaacgagcaggatggcggcgacctggtttacttccagggccacatctccccgggcgtgtacgctcgtgctttcctggaaggtcgtctgactcaggagcagctggataacttccgtcaggaagttcacggcaatggcctctcttcctatccgcacccgaaactgatgccggaattctggcagttcccgaccgtatctatgggtctgggtccgattggtgctatttaccaggctaaattcctgaaatatctggaacaccgtggcctgaaagatacctctaaacaaaccgtttacgcgttcctcggtgacggtgaaatggacgaaccggaatccaaaggtgcgatcaccatcgctacccgtgaaaaactggataacctggtcttcgttatcaactgtaacctgcagcgtcttgacggcccggtcaccggtaacggcaagatcatcaacgaactggaaggcatcttcgaaggtgctggctggaacgtgatcaaagtgatgtggggtagccgttgggatgaactgctgcgtaaggataccagcggtaaactgatccagctgatgaacgaaaccgttgacggcgactaccagaccttcaaatcgaaagatggtgcgtacgttcgtgaacacttcttcggtaaatatcctgaaaccgcagcactggttgcagactggactgacgagcagatctgggcactgaaccgtggtggtcacgatccgaagaaaatctacgctgcattcaagaaagcgcaggaaaccaaaggcaaagcgacagtaatccttgctcataccattaaaggttacggcatgggcgacgcggctgaaggtaaaaacatcgcgcaccaggttaagaaaatgaacatggacggtgtgcgtcatatccgcgaccgtttcaatgtgccggtgtctgatgcagatatcgaaaaactgccgtacatcaccttcccggaaggttctgaagagcatacctatctgcacgctcagcgtcagaaactgcacggttatctgccaagccgtcagccgaacttcaccgagaagcttgagctgccgagcctgcaagacttcggcgcgctgttggaagagcagagcaaagagatctctaccactatcgctttcgttcgtgctctgaacgtgatgctgaagaacaagtcgatcaaagatcgtctggtaccgatcatcgccgacgaagcgcgtactttcggtatggaaggtctgttccgtcagattggtatttacagcccgaacggtcagcagtacaccccgcaggaccgcgagcaggttgcttactataaagaagacgagaaaggtcagattctgcaggaagggatcaacgagctgggcgcaggttgttcctggctggcagcggcgacctcttacagcaccaacaatctgccgatgatcccgttctacatctattactcgatgttcggcttccagcgtattggcgatctgtgctgggcggctggcgaccagcaagcgcgtggcttcctgatcggcggtacttccggtcgtaccaccctgaacggcgaaggtctgcagcacgaagatggtcacagccacattcagtcgctgactatcccgaactgtatctcttacgacccggcttacgcttacgaagttgctgtcatcatgcatgacggtctggagcgtatgtacggtgaaaaacaagagaacgtttactactacatcactacgctgaacgaaaactaccacatgccggcaatgccggaaggtgctgaggaaggtatccgtaaaggtatctacaaactcgaaactattgaaggtagcaaaggtaaagttcagctgctcggctccggttctatcctgcgtcacgtccgtgaagcagctgagatcctggcgaaagattacggcgtaggttctgacgtttatagcgtgacctccttcaccgagctggcgcgtgatggtcaggattgtgaacgctggaacatgctgcacccgctggaaactccgcgcgttccgtatatcgctcaggtgatgaacgacgctccggcagtggcatctaccgactatatgaaactgttcgctgagcaggtccgtacttacgtaccggctgacgactaccgcgtactgggtactgatggcttcggtcgttccgacagccgtgagaacctgcgtcaccacttcgaagttgatgcttcttatgtcgtggttgcggcgctgggcgaactggctaaacgtggcgaaatcgataagaaagtggttgctgacgcaatcgccaaattcaacatcgatgcagataaagttaacccgcgtctggcgtaagaggtaaaagaataatggctatcgaaatcaaagtaccggacatcggggctgatgaagttgaaatcaccgagatcctggtcaaagtgggcgacaaagttgaagccgaacagtcgctgatcaccgtagaaggcgacaaagcctctatggaagttccgtctccgcaggcgggtatcgttaaagagatcaaagtctctgttggcgataaaacccagaccggcgcactgattatgattttcgattccgccgacggtgcagcagacgctgcacctgctcaggcagaagagaagaaagaagcagctccggcagcagcaccagcggctgcggcggcaaaagacgttaacgttccggatatcggcagcgacgaagttgaagtgaccgaaatcctggtgaaagttggcgataaagttgaagctgaacagtcgctgatcaccgtagaaggcgacaaggcttctatggaagttccggctccgtttgctggcaccgtgaaagagatcaaagtgaacgtgggtgataaagtgtctaccggctcgctgattatggtcttcgaagtcgcgggtgaagcaggcgcggcagctccggccgctaaacaggaagcagctccggcagcggcccctgcaccagcggctggcgtgaaagaagttaacgttccggatatcggcggtgacgaagttgaagtgactgaagtgatggtgaaagtgggcgacaaagttgccgctgaacagtcactgatcaccgtagaaggcgacaaagcttctatggaagttccggcgccgtttgcaggcgtcgtgaaggaactgaaagtcaacgttggcgataaagtgaaaactggctcgctgattatgatcttcgaagttgaaggcgcagcgcctgcggcagctcctgcgaaacaggaagcggcagcgccggcaccggcagcaaaagctgaagccccggcagcagcaccagctgcgaaagcggaaggcaaatctgaatttgctgaaaacgacgcttatgttcacgcgactccgctgatccgccgtctggcacgcgagtttggtgttaaccttgcgaaagtgaagggcactggccgtaaaggtcgtatcctgcgcgaagacgttcaggcttacgtgaaagaagctatcaaacgtgcagaagcagctccggcagcgactggcggtggtatccctggcatgctgccgtggccgaaggtggacttcagcaagtttggtgaaatcgaagaagtggaactgggccgcatccagaaaatctctggtgcgaacctgagccgtaactgggtaatgatcccgcatgttactcacttcgacaaaaccgatatcaccgagttggaagcgttccgtaaacagcagaacgaagaagcggcgaaacgtaagctggatgtgaagatcaccccggttgtcttcatcatgaaagccgttgctgcagctcttgagcagatgcctcgcttcaatagttcgctgtcggaagacggtcagcgtctgaccctgaagaaatacatcaacatcggtgtggcggtggataccccgaacggtctggttgttccggtattcaaagacgtcaacaagaaaggcatcatcgagctgtctcgcgagctgatgactatttctaagaaagcgcgtgacggtaagctgactgcgggcgaaatgcagggcggttgcttcaccatctccagcatcggcggcctgggtactacccacttcgcgccgattgtgaacgcgccggaagtggctatcctcggcgtttccaagtccgcgatggagccggtgtggaatggtaaagagttcgtgccgcgtctgatgctgccgatttctctctccttcgaccaccgcgtgatcgacggtgctgatggtgcccgtttcattaccatcattaacaacacgctgtctgacattcgccgtctggtgatgtaagtaaaagagccggcccaacggccggcttttttctggtaatctcatgaatgtattgaggttattagcgaatagacaaatcggttgccgtttgttgtttaaaaattgttaacaattttgtaaaataccgacggatagaacgacccggtggtggttagggtattacttcacataccctatggatttctgggtgcagcaaggtagcaagcgccagaatccccaggagcttacataagtaagtgactggggtgagggcgtgaagctaacgccgctgcggcctgaaagacgacgggtatgaccgccggagataaatatatagaggtcatgatgagtactgaaatcaaaactcaggtcgtggtacttggggcaggccccgcaggttactccgctgccttccgttgcgctgatttaggtctggaaaccgtaatcgtagaacgttacaacacccttggcggtgtttgcctgaacgtcggctgtatcccttctaaagcactgctgcacgtagcaaaagttatcgaagaagccaaagcgctggctgaacacggtatcgtcttcggcgaaccgaaaaccgatatcgacaagattcgtacctggaaagagaaagtgatcaatcagctgaccggtggtctggctggtatggcgaaaggccgcaaagtcaaagtggtcaacggtctgggtaaattcaccggggctaacaccctggaagttgaaggtgagaacggcaaaaccgtgatcaacttcgacaacgcgatcattgcagcgggttctcgcccgatccaactgccgtttattccgcatgaagatccgcgtatctgggactccactgacgcgctggaactgaaagaagtaccagaacgcctgctggtaatgggtggcggtatcatcggtctggaaatgggcaccgtttaccacgcgctgggttcacagattgacgtggttgaaatgttcgaccaggttatcccggcagctgacaaagacatcgttaaagtcttcaccaagcgtatcagcaagaaattcaacctgatgctggaaaccaaagttaccgccgttgaagcgaaagaagacggcatttatgtgacgatggaaggcaaaaaagcacccgctgaaccgcagcgttacgacgccgtgctggtagcgattggtcgtgtgccgaacggtaaaaacctcgacgcaggcaaagcaggcgtggaagttgacgaccgtggtttcatccgcgttgacaaacagctgcgtaccaacgtaccgcacatctttgctatcggcgatatcgtcggtcaaccgatgctggcacacaaaggtgttcacgaaggtcacgttgccgctgaagttatcgccggtaagaaacactacttcgatccgaaagttatcccgtccatcgcctataccgaaccagaagttgcatgggtgggtctgactgagaaagaagcgaaagagaaaggcatcagctatgaaaccgccaccttcccgtgggctgcttctggtcgtgctatcgcttccgactgcgcagacggtatgaccaagctgattttcgacaaagaatctcaccgtgtgatcggtggtgcgattgtcggtactaacggcggcgagctgctgggtgaaatcggcctggcaatcgaaatgggttgtgatgctgaagacatcgcactgaccatccacgcgcacccgactctgcacgagtctgtgggcctggcggcagaagtgttcgaaggtagcattaccgacctgccgaacccgaaagcgaagaagaagtaatttttcgtttgccggaacatccggcaattaaaaaagcggctaaccacgccgctttttttacgtctgcaatttacctttccagtcttcttgctccacgttcagagagacgttcgcatactgctgaccgttgctcgttattcagcctgacagtatggttactgtcgtttagacgttgtgggcggctctcctgaactttctcccgaaaaacctgacgttgttcaggtgatgccgattgaacacgctggcgggcgttatcacgttgctgttgattcagtgggcgctgctgtactttttccttaaacacctggcgctgctctggtgatgcggactgaatacgctcacgcgctgcgtctcttcgctgctggttctgcgggttagtctgcattttctcgcgaaccgcctggcgctgctcaggcgaggcggactgaatgcgctcacgcgctgcctctcttcgctgctggatcttcgggttagtctgcattctctcgcgaactgcctggcgctgctcaggcgaggcggactgataacgctgacgagcggcgtccttttgttgctgggtcagtggttggcgacggctgaagtcgtggaagtcgtcatagctcccatagtgttcagcttcattaaaccgctgtgccgctgcctgacgttgggtatctcgtgtaatgactggtgcggcgtgtgttcgttgctgaaactgatttgctgccgcctgacgctggctgtcgcgcgttggggcaggtaattgcgtggcgctcattccgccgttgacatcggtttgatgaaaccgctttgccatatcctgatcatgatagggcacaccattacggtagtttggattgtgccgccatgccatattcttatcagtaagatgctcaccggtgatacggttgaaattgttgacgtcgatattgatgttgtcgccgttgtgttgccagccattaccgtcacgatgaccgccatcgtggtgatgataatcatcattgtcatgatgatgatggtcatgatcgtcgtcgtcccagtcgatgctgctgaatagtgcgtacgtggtagcaacgcccatgctatagccgaatccgcgtacaaagctgtcaacaaacggttctccggctggtggtggcagataaaccggcggatacgcagtattggcccagttcccgtaaaccacggttgggttgtagttgggaatatagaccacatcaggattggcgggctcaatggaaatgacggttgttgccggctctgtaatgacggggttggcagttaaaactgtattggatggtatgacgggtgccgtgactgtctgttttaccggtacagctttcttcgttgtggtaataactttctgttcggttgatgacttcagcgagccggtttgttgcgccagttgccgcaatcgctgtaccgagtccatcacgtcctgcggctgggccagaaaagcatcgcccaggttttgcacccattgcgggttttcgcccatcaatgccatcaattgtggaaaggccaccagtgatttaacgctggcgtcccacggctggtcagataccgcctgaatagcagcatcgccttgtttaagtggattatcgtgcgaccattgcactgcttgagcaacgtttgtcggataggttgatgccatcagcacctgcgaaagtagggcgtcgggatacagcgcgacgggcgcgacccattgatctatttgtgcagtgctgaatgcggatttgacgacggcgggtgttacgggaggtgcggaaaccgttgcaggaaacgtaaccgcggcagcgtcagacacagccagttgtgtcgattgcggttccacaggcgcttccactgtgcggctttttatatatagtccggtagaggcggcacaaagcccggcactgcaaattagcgccagcacatggggtttaaacggcaaagtcattttcataattcggatctcaaggaaatcgcaatggtcggcgaactgccacccgcaggtgctgtgaatccgagtataaagaggtggtagtttaaattttgaccaatcttgggattcgttgagaaaggtgattatcaccatgcgaattaacgaagtttttacggagggaaacaatctctagaccatccttaacgattcagccacttttttatgttgcttttttgtaaacagattaacacctcgtcaaaatcctgctattctgcccgttgcggtactgggcatttaccctacaaactgctgtctcacaggagcgtgaagagaatcgcctgccgcactatgacaatgagagcgaggagaaccgtcgtgctagaagaataccgtaagcacgtagctgagcgtgccgctgaggggattgcgcccaaacccctggatgcaaaccaaatggccgcacttgtagagctgctgaaaaacccgcccgcgggcgaagaagaattcctgttagatctgttaaccaaccgtgttcccccaggcgtcgatgaagccgcctatgtcaaagcaggcttcctggctgctatcgcgaaaggcgaagccaaatcccctctgctgactccggaaaaagccatcgaactgctgggcaccatgcagggtggttacaacattcatccgctgatcgacgcgctggatgatgccaaactggcacctattgctgccaaagcactttctcacacgctgctgatgttcgataacttctatgacgtagaagagaaagcgaaagcaggcaacgaatatgcgaagcaggttatgcagtcctgggcggatgccgaatggttcctgaatcgcccggcgctggctgaaaaactgaccgttactgtcttcaaagtcactggcgaaactaacaccgatgacctttctccggcaccggatgcgtggtcacgcccggatatcccactgcacgcgctggcgatgctgaaaaacgcccgtgaaggtattgagccagaccagcctggtgttgttggtccgatcaagcaaatcgaagctctgcaacagaaaggtttcccgctggcgtacgtcggtgacgttgtgggtacgggttcttcgcgtaaatccgccactaactccgttctgtggtttatgggcgatgatattccacatgtgccgaacaaacgcggcggtggtttgtgcctcggcggtaaaattgcacccatcttctttaacacgatggaagacgcgggtgcactgccaatcgaagtcgacgtctctaacctgaacatgggcgacgtgattgacgtttacccgtacaaaggtgaagtgcgtaaccacgaaaccggcgaactgctggcgaccttcgaactgaaaaccgacgtgctgattgatgaagtgcgtgctggtggccgtattccgctgattatcgggcgtggcctgaccaccaaagcgcgtgaagcacttggtctgccgcacagtgatgtgttccgtcaggcgaaagatgtcgctgagagcgatcgcggcttctcgctggcgcaaaaaatggtaggccgtgcctgtggcgtgaaaggcattcgtccgggcgcgtactgtgaaccgaaaatgacttctgtaggttcccaggacaccaccggcccgatgacccgtgatgaactgaaagacctggcgtgcctgggcttctcggctgacctggtgatgcagtctttctgccacaccgcggcgtatccgaagccagttgacgtgaacacgcaccacacgctgccggacttcattatgaaccgtggcggtgtgtcgctgcgtccgggtgacggcgtcattcactcctggctgaaccgtatgctgctgccggataccgtcggtaccggtggtgactcccatacccgtttcccgatcggtatctctttcccggcgggttctggtctggtggcgtttgctgccgcaactggcgtaatgccgcttgatatgccggaatccgttctggtgcgcttcaaaggcaaaatgcagccgggcatcaccctgcgcgatctggtacacgctattccgctgtatgcgatcaaacaaggtctgctgaccgttgagaagaaaggcaagaaaaacatcttctctggccgcatcctggaaattgaaggtctgccggatctgaaagttgagcaggcctttgagctaaccgatgcgtccgccgagcgttctgccgctggttgtaccatcaagctgaacaaagaaccgatcatcgaatacctgaactctaacatcgtcctgctgaagtggatgatcgcggaaggttacggcgatcgtcgtaccctggaacgtcgtattcagggcatggaaaaatggctggcgaatcctgagctgctggaagccgatgcagatgcggaatacgcggcagtgatcgacatcgatctggcggatattaaagagccaatcctgtgtgctccgaacgacccggatgacgcgcgtccgctgtctgcggtacagggtgagaagatcgacgaagtgtttatcggttcctgcatgaccaacatcggtcacttccgtgctgcgggtaaactgctggatgcgcataaaggtcagttgccgacccgcctgtgggtggcaccgccaacccgtatggacgccgcacagttgaccgaagaaggctactacagcgtcttcggtaagagtggtgcgcgtatcgagatccctggctgttccctgtgtatgggtaaccaggcgcgtgtggcggacggtgcaacggtggtttccacctctacccgtaacttcccgaaccgtctgggtactggcgcgaatgtcttcctggcttctgcggaactggcggctgttgcggcgctgattggcaaactgccgacgccggaagagtaccagacctacgtggcgcaggtagataaaacagccgttgatacttaccgttatctgaacttcaaccagctttctcagtacaccgagaaagccgatggggtgattttccagactgcggtttaaaaagtcagcgcacgcgctgcgcataaacgacacaatgcccggtgaatgagattcccgggcatttttttatttctaaaccatcgccgttccgctgtttttctccggtaaggctgcgataattacatcaatggcgcaatgcgatttcggtgcattgccgggagcagaggaacacactatggattacgaatttctgcgcgatattaccggagtggtaaaggtgcgtatgtccatggggcatgaagtggtcgggcactggtttaatgaagaggtgaaagaaaacctggccttgcttgatgaagtggaacaagcagcgcacgcactgaaaggtagcgaacggtcctggcaacgggcagggcatgaatacaccctgtggatggacggtgaagaggtgatggttcgcgccaatcaactggaattcgctggcgatgaaatggaagaggggatgaactactacgacgaagaaagcctgtcgctatgcggcgttgaggattttctgcaggtcgtggcggcttaccgcaatttcgtgcagcagaagtaaataaatctggcggagcctgggagctccgccagagccgttaaacagctggcatattgcgcccgtaataaatctcgcgcatttctttccacagcgcagcggtaatttcctggcgctcgctgtcggttaagtcttccggtttggtgtggaacatgtagtgcttaaggtcgaactctttaagcaacatcttggtatggaagatattttcctgatagacgttcacatccaccatgtcatacagcgccttcatatcgtcagacataaagttctgaatcgaattaatctcatggtcgataaagtgcttcataccgttaatgtcgcgggtaaaaccgcgcacgcgataatcaatggttacgatatcggactcaagctggtggatcaggtaattcagcgccttcagcggagaaatcacgccgcaggtagagacttcaatatcggcgcggaaggtacataaaccgccttcaggatgactttccgggtaggtatgtacgcaaatatgacttttatcaagatgggcaacgaccgtttctggcagtgggccggggtgttctgttttgtcgatgagtttcgggtcaaccggttcttcactcaccagaatagtgacgctggcaccctgtggttcgtaatcctggcgggcgatgttaagaatattagccccgataatggaacaggtttctgacaggatttcggtcagacggttggcattatagagttcatcgatataagcaatataaccgtcgcgctcttcggcagttttggcgtagcagatatcgtaaatacaaaaactcagacttttggtcagattattaaagccatgcagtttcagttttttcaatttcttatcttctccttaggacggctgtgaagccagtgcgtcttgcagatactgaggtaaggcaaaagctgccgtatggattgccggattgtaataacggcatttcaggccagaggcgagaaaacgcgcctgaataatttcggttgagagatggcgtaaggcgtcgttatctgtcgcccatgcaaaagtcatgataccgccgtaataggtcgggatcgccgcctgataaaagccaacgtcgctgaagtaatggctgagtttgcgatggctgtcgatggcttcttcctgctgtaaaaagcagacgccgttttgtgcgacgaagataccgccaggattcaggcaacgtttgcagccttcataaaatgccgaagtgaaaaggctttcgccgggaccgataggatcggtgcagtcggagataatgacatcaaaggtctggctggtttgattaacgaaattgactccatcgtcgatcaccagcttaaagcgcggatcgtcgtagctaccggcgttatggttgggtagatactgacggcagaacgatacgacacccgcatcgatttccaccatcgtgattgactcaacgtttttatgtcgggttacttcacgcagcatggcaccgtcgccgccgccgataatcagcacatgtttcgcgtgaccatgggccagtagcggaacatgggtcatcatctcatgatagataaactcgtcgcgctcggtggtttgtactacgccatccagcgccattacgcgaccaaatgcagcgttctcaaaaatgatcagatcctggtgatcggtcttttcatgatacagaacgttatctaccgcaaagtactgcccaaactggtcgtgtagcgtttcatgccactgttttttttcggccatgggttgatacctcctttgttaacacccgtaaaaaaagggcgcaacataatagctaacattgaccgcggatgcacggtcaatatttctacaaaaaggtatcagggattatttgacgtaggcaagcaggcttaaggaatcgcgggccagggctttgcattttttagcgacgggaatgccaatgccgctgagatcgcggtagctgtcttcaccgagggctttcatgtcgaaggtgtcgtaattactgaggtcccactggttttgctgagcgaaaaagaccagtgcgcgacgaatttgcccgttaggtaagttctggtaaccacaatcgttcttcagaaagacaaaaactgccgttaaatcggccatatcttcggcttcagactcgctgagcgcgtaactgtttgcgcagacggccatcaggctgccgaataacactgttctgaaaaacgtcttcattgcttctaccaggggcttaaagaagataaacgttagcacactgcgagcgaggcgacgaccattattgtcgattaaattgtgtctgcggcttgaccttcccgtaaggggaaggactatgctcaacgtttgattttgtctcgcctgcttaagaataaggaaataactatgcaacgtcgtgatttcttaaaatattccgtcgcgctgggtgtggcttcggctttgccgctgtggagccgcgcagtatttgcggcagaacgcccaacgttaccgatccctgatttgctcacgaccgatgcccgtaatcgcattcagttaactattggcgcaggccagtccacctttggcgggaaaactgcaactacctggggctataacggcaatctgctggggccggcggtgaaattacagcgcggcaaagcggtaacggttgatatctacaaccaactgacggaagagacaacgttgcactggcacgggctggaagtaccgggtgaagtcgacggcggcccgcagggaattattccgccaggtggcaagcgctcggtgacgttgaacgttgatcaacctgccgctacctgctggttccatccgcatcagcacggcaaaaccgggcgacaggtggcgatggggctggctgggctggtggtgattgaagatgacgagatcctgaaattaatgctgccaaaacagtggggtatcgatgatgttccggtgatcgttcaggataagaaatttagcgccgacgggcagattgattatcaactggatgtgatgaccgccgccgtgggctggtttggcgatacgttgctgaccaacggtgcaatctacccgcaacacgctgccccgcgtggttggctgcgcctgcgtttgctcaatggctgtaatgcccgttcgctcaatttcgccaccagcgacaatcgcccgctgtatgtgattgccagcgacggtggtctgctacctgaaccagtgaaggtgagcgaactgccggtgctgatgggcgagcgttttgaagtgctggtggaggttaacgataacaaaccctttgacctggtgacgctgccggtcagccagatggggatggcgattgcgccgtttgataagcctcatccggtaatgcggattcagccgattgctattagtgcctccggtgctttgccagacacattaagtagcctgcctgcgttaccttcgctggaagggctgacggtacgcaagctgcaactctctatggacccgatgctcgatatgatggggatgcagatgctaatggagaaatatggcgatcaggcgatggccgggatggatcacagccagatgatgggccatatggggcacggcaatatgaatcatatgaaccacggcgggaagttcgatttccaccatgccaacaaaatcaacggtcaggcgtttgatatgaacaagccgatgtttgcggcggcgaaagggcaatacgaacgttgggttatctctggcgtgggcgacatgatgctgcatccgttccatatccacggcacgcagttccgtatcttgtcagaaaatggcaaaccgccagcggctcatcgcgcgggctggaaagataccgttaaggtagaaggtaatgtcagcgaagtgctggtgaagtttaatcacgatgcaccgaaagaacatgcttatatggcgcactgccatctgctggagcatgaagatacggggatgatgttagggtttacggtataaaaagaccgtattcggaaatatgcccggatctctccgggcattaaactgatgacaaacgcaaatctgcctgatgcgctacgcttatcaggcctacgctagctgtgcaatccattgattttgcacaattttgtaggctggataaggcgttcacgccgcatccggcatgaacaacgcgcacgttgtcagcaatctgagcaagtcttacttcacatcatccggcagcgcataagccacaatatagtcgcccatcttcgtaccaaatgaaccgtgaccgcctgcggagatcaccacatactgcttaccattcacttcataggtcattggcgtagcctgaccacccgctggtaaacgaccctgccacagtttttcaccgttgctcatgttgtaagcgcgcaggtagttatctgccgtagcggcgataaacagcacgttacccgccgtggagattggcccgcccagcatcggcatacccatattgaacggcaccggaaccggcatcgggaacggcatactgtcctgcggcgtaccaatacgtttcttccacaccacttcattagttttcagatccagcgccgagatataaccccatgctggctgtttacatggcagaccaaatggtgagaggaacgggttgagcgtgacaccatacggtacaccgtactgtggctgaatgccggattccgtacccgtgcctttggcatctttcggctgctccatcgggttgccaggaccacgcgggatcagtttcgaaacaaacggcagtgccattgggttggcaatcgccacttcacgatttggatcaacggaaatcccgccccattcgaacatccccaggttacccgggaagaccagcgtaccctgttcagatggcggggtgaaaatgccttcatagcgcatctggtggaacatcacgcggcacaccagttggtcaaacatggtggctccccacatatccgcaccgctcaaatctttcgtcggacggaagctcagttcagaaaacggttgagttggggttacgtaatcgcctttcgctgcaccttggggaaccggtttttccggtgccggaaccaccagttcgccattacgacgatcgagcacaaaaatgttgccggttttcgccggagcgtaaataactggcactttctgaccattaacggtgatgtccgccagcgtcggctgtgccggaagatccatgtcccacaggtcgtggtgaacggtctggtagctccacgccagtttcccggtagtggcattcagcgccagaatcgagctggcataacgttcctgttccggtgtgcggttaccgccccagatatccggcgtggtcacgcccatcggcagatagaccagatccagcttcgcgtcataggccgctggtgcccaggagtttggcgagttaaaggtaaaggtgtgttcgtcagacgggattgcgttcggatctttcgcgccgggatcaaaagcccacagcagctccccggtgttgacatcaaaaccacggatcacgccagacgtttcgcgggttgagaagttatcggtaactgaaccggccatcacgatggttttatcggtgataatcggtggcgaagtcggttcatacagacccggtttggtgtctggcatattgctttgcagattgagcacgcctttattggcgaaggtttcgcacagtttgccgttttcagcgttaatcgcaatcagtcgaccatcattgaccggaagaatgatacgacgcgggcaatccgccatcacttccggcgaagcggtttctgctttggcttcatgataagagacaccacggcaggttacgtgctggaaagactcgttggttttcagctcaggatcgtaatgccatttctctttgccgctggcggcatcaagcgcaaacaggcgctggtgagcggtacacaggtaaagggtgtcgcccactttaatcggcgtcacttcattggtgatttcacccggatcgttcggctgcttcacatcgccagtacggaacacccaggcttctttcagattatggacgttatcggcgttaatttgtttcagcggcgaaaagcgttgaccttcctgattacgaccataggcaggccagtcctgatcggctacgggggagatagcttcagcaggtgtggcatcggcgcttaaggtgccgttgatctcctgcggatcgttaaatccggcccaggtcaggataccaccgctaatcagcagtgcgaccaccagtgcggcaactgcgccgctggcaggaatgaccaggcgacgccagacaaacggcaggatcagccagatgccgaagaagaccagaatgtcgctgcgcggagtcagcgcccagaagtcgaaaccaacttcccagacgccccaaatcatggtgccgagcagcagggctgcgtatagccaaagcgcggcgcgtttactgcgccacagcatccaggcgacgccgagcatcacaaggccagcgatagggtagtaccaggagccgccaatcgcgaccagccagcctccgccaatgagtagatacagcccgcaaagcgctgcaaaaagggctgttagcgtgacgagtaatcgtcgcgagcctgtattgttaattgccataaagagacaccatttcaattcattaatattttagtagcaattaattataggttttaacatgtgtgatcgtcatcacaattcgagctttattaacagattccgcgaatgaatagttttactggtatactgcgtgtcttgcgctttgttgcggtgccaaaacctgcccgtgcgaagtgatttgtttttaaatcatatggttagagatatgaaacatactgtagaagtaatgatccccgaagcggagattaaagcgcgtatcgccgaactgggtcgtcagattactgagcgttacaaagacagcggcagcgatatggtgctggtgggtctgctgcgtggctcatttatgtttatggcggacctgtgccgtgaagttcaggtatctcatgaagtcgactttatgaccgcctccagctacggtagcggcatgtccaccacccgtgatgtgaaaatcctcaaagatctggatgaagatatccgtggcaaggacgtgctgattgttgaagatatcatcgactcggggaatacactgtcgaaagtgcgtgagatcttaagcctgcgcgaaccgaagtcgctggcgatttgtacgctgctggataaaccgtcccgtcgtgaagtgaacgtcccggtagaatttatcggtttctcgatcccggatgagtttgtggtgggttacggcattgattacgcacagcgttaccgtcatctgccgtatatcggcaaagtgattctgctggacgagtaagtgtgaagttgccggatgtgttgcatccggcatggcatttttatttgtggttggcgtgtttcagcttgaggttggaaatcccgtgacggtaacgttgctcaagggtttcgcggttggtggcggtaacatccagatcacgcagcaagccgtcgtgaatgccgtaggcccagccgtgaatggtaactttctgcccgcgtttccacgctgattgcataatggtggagtggcccaggttatacacctgttccatgacgttcagttcacacaaggtatccagacggcgctcttgcggcatttcgccgagcaatgagctatgtttgaaccagatatcgcggatatgcagcagccagttgttgataagccccagttccgggttttcaactgcggcttgtacgccgccgcaaccgtagtggccacagataataatgtgttcaacttcgagtacatccactgcatactgaaccacggaaaggcagttcaggtcagtgtgaatgaccaggttagcaacattacggtgaacaaagagttcgcccggctcaagaccggttaaacgttctgcaggaacgcgactgtcggaacatccaatccatagaaagcgcggtttttgcgcttgtgccagtttctcaaaaaacccgggatcctcttccaccagcatttttgaccatagtgcattgttgctgatgagtgtatctatgtctttcatggaggttaacgacctgtaaccaaataattacgtttggctaatatagggcaactccgggacgatttaaaccacagataaagtgtaagaacgtaaggtaagtaaaaatttatgaccattgcactggaacttcaacagcttaaaaaaacctatccaggcggcgttcaggcgcttcgtgggatagatttgcaggtcgaagcgggtgatttttatgcgcttctcgggccgaacggggccgggaaatcgaccactatcggtattatcagctctctggtaaataaaacctccgggcgggtcagcgtatttggttacgatctcgagaaggatgtcgtgaacgctaaacgtcagttgggactggtgccgcaggaatttaacttcaacccgtttgaaaccgtgcagcaaattgtggtgaatcaggcagggtactacggcgtggagcgcaaagaagcgtacatccgcagcgaaaagtatcttaaacaactcgatctatggggaaaacgcaacgaacgtgcgcgtatgttatctggcgggatgaagcgccgtttaatgattgcccgtgcgttaatgcatgaacctaaactactgattctcgacgaaccgaccgcaggcgtggatattgaacttcgccgctcaatgtggggctttttgaaggatttaaacgacaaaggcaccaccatcattctcaccacacactacctggaagaagcagaaatgctgtgccgcaatatcggcattattcaacacggtgagctggtggaaaatacctcgatgaaggcgctgctggcgaagctgaaatcggaaacctttattctcgatctcgcaccgaaaagcccgttaccgaagctcgatggctatcagtatcgactggtcgataccgcgacgctggaagttgaagtgctgcgtgagcaggggatcaacagcgtatttacgcagttaagtgagcagggcattcaggtattaagtatgcgtaacaaagctaaccgtctggaagagctgtttgtttcactggttaatgaaaaacaaggagatcgcgcatgatgcatctttactgggtggcgctaaaaagcatctgggcgaaagagatccatcgctttatgcgtatctgggtgcagacgctggtgccgccagtcatcaccatgaccctttactttattatcttcggtaacctgattggttcgcgtattggcgatatgcatggcttcagctatatgcagttcatcgtaccggggctgatcatgatgtcggtgatcaccaatgcctacgccaacgttgcgtcatcattttttggtgccaagttccagcgtaatattgaagagctgctggtagcgccggttccgactcacgtcattattgccggatatgtcggcggtggcgtggcgcgtggtctgtttgttggcattctggtgacggcaatttcactgttttttgtgccatttcaggtgcattcgtgggtattcgttgccttaacgctggtgctcacggcggtgttgttctcccttgcgggtttgctgaacggtgtgtttgccaaaacgttcgatgacatcagcctggtgccaacctttgtgttaacgccactcacgtatttgggcggggtcttttactcactgactttgttgccgccgttctggcaagggctgtcgcacctgaacccaatcgtttatatgatcagtggtttccgctacggcttcctcggtatcaatgatgttccgctggtcactacctttggcgtactggtggtctttattgtggcgttttatttgatctgttggtcgctgatccaacgtggacgtggtttgcgtagctaaggctatttcctctcctctggatttgggggagaggagttttgacggctatcaccctttatcaacaatggtcagggtagactgattttcggctaaggaggaaggcgatgttaggttgggtaattacctgtcacgatgaccgggcgcaagagatactggatgcgctggagaaaaaacatggggcacttcttcagtgccgggccgtgaatttctggcgcggattaagctctaatatgctcagccgcatgatgtgcgatgctctgcatgaagcggactctggtgagggtgtcatcttcttaaccgatatagccggagcgccaccgtatcgcgtggcttcattattaagccacaaacactcccgttgcgaagtgatttctggtgtcacgttaccgttaattgaacagatgatggcttgccgtgaaaccatgaccagttcagagtttcgcgagcgtattgtcgaactgggtgcgccggaggtgagtagtctttggcaccaacaacaaaaaaatccgcctttcgtcctcaaacataatttgtatgagtattaacccgcgattctgatggcgcttttgctacaataaaagcgttgtttcaccctcggttattttttcatgtacaaacaagctgttattctcctgctgatgctgtttaccgcaagtgtcagtgccgcgttacctgcccgttatatgcaaaccatcgaaaatgctgcggtctgggcgcaaattggtgacaagatggtgaccgtggggaatattcgggccggacaaatcattgccgtggagcccactgccgcaagttattacgcatttaattttggctttggcaaaggttttatcgataaaggtcatctcgagccggttcaggggcgacaaaaagttgaagacggtttgggcgacctcaacaagccgctgagtaatcagaacttagttacctggaaagatacgccggtctataacgcgccgagtgcgggaagtgcgccatttggggtactggcggacaatttgcgctacccgattttgcataaactgaaagacaggttaaatcaaacctggtatcagatccgtattggcgatcgactggcctatatcagcgcactggatgcccaacccgataatggcctgtcggtgctaacctatcaccatattctgcgcgacgaagaaaacacccgttttcgccatacttcgacgaccacatcggtacgcgctttcaataaccagatggcctggctgcgtgacaggggatacgcgacactgagcatggtgcagctggaaggctacgtgaagaataagatcaatctccctgcgcgagcggtggtgattacctttgatgatggcctcaagtcggtgagccgctatgcgtatcctgtgttgaaacaatatggcatgaaggcgacggcgtttattgttacctcacgcatcaaacgtcacccgcagaagtggaacccaaaatcgctgcaatttatgagcgtttctgagcttaacgaaattcgcgatgtatttgatttccagtcacatacccattttttgcatcgggtagatggttatcgccgacccatattactgagccgtagtgagcacaatattctgtttgattttgcacgttcacgccgcgctctggcgcaatttaatccgcatgtctggtatctttcgtatccgtttggcggatttaatgacaacgccgtgaaggcagcaaacgatgccggatttcacctggcggtgacaaccatgaaaggcaaagtaaaaccgggggataatccgttgttactaaaacgactttatatcttaagaacggattcgctggagacgatgtcgcggctggtgagtaaccagccgcagggataacaatcaagcaacctgtaccggaatcgctttcgcggtacgtttcatttcattgtcgccttcaaaataggcgacgttgggtcgccaggtgcgagcttcttcatctggcatggtaacgaagctggcgatgatgacaatatcgccgacactggcgcagtgggccgccgcaccgttaacagaaataattctcgaaccgcgttctgccgcgatggcataagtggagaaacgcttgccgttggtgacattccagatatcaatggcttcgttttcgagaataccggctgcgtcaagaaaatcctggtcaatggcgcaagaaccttcatagtgcaggtccgcatgagtcactttcacgcggtggagtttgccctgcagcatcgtgcgaatcataacttctacctttctaccctgtcgttaacgaagcaggcgatgcctgctttgaggaaattctcacgcagtattgcccgatttttgtttagtgtctactcatctgacggcatttgcgtcagcagtttgcgtaccgcgccgaagcgtgccatgtatcgcctgtaacgaattgatatttctctgaacgctgctcggtaaacaataaagaggtggctgacgatagcgcgccttgactggatactgccttcacgcaaagccacacggaagacagggaagatggatgcaccgagtaccacaccgcatgacgcggtatttaaacaatttttaatgcatgcggagacggctcgcgactttctggagatacatttgccagtggaattacgcgaactttgtgacctcaacacgcttcatttagagtcggggagtttcattgaagagagcctgaaaggacacagcacggacgtgctctattccgtgcaaatgcagggcaatcccggttatctgcatgttgtgattgaacaccaaagcaagccggataagaaaatggcctttcgcatgatgcgttattctatagccgccatgcaccggcatctggaggctgaccacgataagctgccgctggtggtgccgatactgttttatcagggcgaggccacaccttatccgctatcaatgtgctggtttgatatgttttactcgccggagctggcgcgacgcgtctataacagtcctttcccgctggtggatatcaccatcacaccggatgacgaaatcatgcaacatcggcggattgcgattctcgaactactgcaaaaacatattcgccagcgcgacttaatgttattgcttgagcaactggtcacgctgatcgacgaagggtacactagcggaagtcagttagttgccatgcaaaactatatgctgcaacgcggtcatactgaacaagcggatttgttttacggtgtgttgagagacagggaaacgggaggggagtctatgatgacgctggcgcagtggtttgaagagaaagggattgagaaggggattcagcagggaagacaggaagtaagtcaggaattcgcccagcgtcttctgagtaaaggaatgtctcgggaagacgttgcagagatggcaaatttacctcttgctgagattgataaggtaattaaccttatttaagttacctgtgttatgacagatgacgtggggtaaattaataactggcgccatcagccgtagcgccagttaagtattacgccagctcgaccattttgttgtcgatcaggcgagcatcgccaagccaggcggctaccagaattactgcccgtttgctggtttcagaaacttccagcaatgtgtcggcatcgcgaatctgaatatcatcggcgcggaagcctttttcattcagttcttgccccgcaatggtaataatttcatcgagatcccgttccccagcctgcaatttgtcagcaatcgaacttaaaactttgtacagaccaggcgcaattttgcgttgttccgccgtcagataaccgttacgggaacttagcgccagaccgtctttggcgcgcataattggcacaccgacaatctcaatatcgaagcccatatcggcaaccattttgcggatcagcgccagttgctgaaaatctttttcaccgaagcaggcgatgtccggctggaccaggttgaacagcttgctgacaatagtcgaaacgccgcgaaaatgtcccggacggctggcaccttccagcatggtcgaaaggccaggaacgtcaacgtaagtgtgggtttcagtaccgttcgggtagatctcttttaccgaaggggcgaaaactaaatccactttacgtttgtttagcttctcgcagtcctcctgcaaggtccgtggataacgagccagatcttccgggcggtcgaactgcatcgggttaacgaaaatactgacgacgaccacatcggcgcgggctttggcttcgtcgaccagcttcatatggccatcgtgcaggttacccatggtaggcaccagcgccacgcgcttgccttccatacgcaggcggcgaatttgctgacgcagcagcggcagggtttcgataattaacacaacgtgactccttaatggaaactgtgttcttcgcccggataaacgccggactccacttcagccatatactgccgcacagccgcgcggatgtcgcccgtttcggcgaggaaatttttagcgaatttaggaatgtgaccgccggtaataccaaaggcgtcgtgcatcacgaggatctgcccgtcagtgacgttgcctgcgccaatgccaataaccgggatcgccagtgcttcggtaatacgttttgccagttcaaccggcacgcattccagcaccagcagctgtgccccagcagcttctaaggctaatgcatcgctgagcagttgatcgcccgcttcatcgccgcgcccctgaactttgtagccaccgaaaatattcactgactgtggtgttaaacctaagtgaccacatacaggaacggcacgttcggtcagcatttgtacggtttctaccagccactcaccgccttcaattttgaccatgttagcaccggcacgcataaccgttgcggcgttttcgaaggcttgttccggcgtggcatacgccataaacggcaggtcagccagcagcaggcagtttggtgcgccgcgacgtacggcggcagtgtggtaggcgatatcggcaacggtaactggcagggtggagtcgtgcccctgaaccgtcatgcccagcgaatcgcccaccagcatgacgttaacccttcatcagcaaagagtttggcgaagctatagtcataagcggtgatggtcgcgaaacgttttttttcctgtttgtacttctgcagtaaggagatggtggtcggtttcataacgtatcctgataaattgatgttgtgctgtctggcattttatcagtcacattggtgggggcaatgatttatccgtagcagcactgccagaaggtgacagtgctgctacgttatcagggataggttacctggaaagtactggtggctttaaattcgccgggttcgatagcaatattcccgtcttgctttaatgttgcctggaaatgaagaggctgtgatgtgccgttaccttgattagggtaaaccccatcggaggtgtcatcttcggtttcataatctatataaacagaattcgtatcattaggttttaatgtcattagcggatttttactggttgctaaaccttcaatgagtacgccaacgcctttggcggcagtgcttccagtaagcgtattaccaagcagttgtgtgttttgagtacctacttttccagtgacgagttttgtttcaatattacgcacacgaatacaattctgaagcgagatatcaaagggaacaggtgaagcgccatttttaattgtcccagagctatattctcccattctaaccgttgaaccattgactgatggcccggtaagtatggaggtaaaacatgttggtaaggttaatttgacattattcagtgtgaaattgacataaatgtggttgctgtgatctacaacttttgtaccaggactgtaggccttaaacgaataaaggtaatttgatgaactggataactggacttgctgattaagtgtaggatcgaaattagtatctgtataaaattcaacagttatgttgtgtactataccaccaatagcccaaaacttatcgtagtcgtctgctttgttgcaacccttagtttgtagatcgctgtctgtgacggaaaagaaaaattcttggttggaaggatctccgatatagattcctggcgattgaatgtcagttattgtatcgtatgcagaccagacccttgatattaacatggtgtaatacagaccaggaacagatgtattaaatagtttatgtccgccataatctttacctgaatagaccatggcattttcaatagttattggaccaggattcgctctgccagatgtattgcagtaaagaataccaccaccggtacctgtatccaggtatgaccagtacatttttaccccagtcgggccgagctgcgtgggtttataaaaaaccaagttgcttgctgttgatgtgtaattaaaggtcatctgtgcggcagtggaggggcctcgatagttatcaactcctgcattatttcccacaataaaacttgtatatgcactgactgtattacaacaagaatacagtgctaaaaaaagaatgtacctgaagatagtcttcatttttactccaatgtttctttattgttatggtttgcgctgtttttgtttgttattcgtagtaaatatccactaacacatggctcataagttgaccagatgtaacactcaatgcaggatcgattttttgcattcgggtgctaaatttccaggatgaaccattcatgtcatccgacattactggataaacggaacgagatccgcctgaagcattaagaacattgaatgtattcgccgaatcctgagtagaaaatataactactcctacattacttgctcctgacgaaatttcattagcaaatatttgcctagagccagcagccatgacaccgctaagggctctaaaatcaatatgtaactgatttagcacatcgccagttccctgtaatgcacagtcggatacagtgatagtgaactcttttccacctggttgataactttcaggagtaacattacctgaaaaatatcccaccccaacgacgccaagatcaatattaccctggttactgattccgcttttgcaggtgctgttttttacattggcaacaaggtcaatatcctgtccagcaatggctggacaggcgatgcaaaacagtaatgacagaaacagaattattctcttcatcagcttacgttgagtgggatgcatatatagttcctgaatctgtaagtctgttagttataggttactgtaaatgtggctggtgcagaaaacttacccgcagtgacattgtttacggttttatttttttccacgaccaggcgtgcactcatcggataataaacgaccgcattggctgcagtggagattgttacctcttgtgatgctggtgttacacagctaaattgtgttgcactccctgttgccggagttacagtgctccagacttcaacggcgacagcacttgctttatctgcggctgtggaaccatttgcaaaccccgcaccgtcattagcagttccctcgcatgtggctcgcttggttaattttatttgcgcttttttattggggatacccgcacagtctttgaatttgagtttgaatgtttttactttggtcttggcattgatttcagaaatatatacatcaccaaaatcaacaacagaaatgtcctgatcagagtcatttactaatgtagcggtacaagtacccatttctacagtagtaataacggtcagtccaatactgtctgttgccgcataagagagtacgctgaacaatgaggcagccaaaacgacactgctggataatccataacgtaaatttttaaatgtcatcataattatccttcttattgatagatgaaattaaacgtcgccagtgcacgaaaattccccggtacgccttgccctgcatctgtttcacgtagcgcaacggtcatttcaagacccttatcgggctgcatctcgtctgtgctccagcgtatcttttccgcactgttaggtttaaggaaagtggcatcatcagtagtccgttttttgaaacccataccgatattacttgtcgtcgaagatgaatcaccagactgcggtataataagcttaggtgagcttgatgatgcatttccggtcagagtggtatcaatccaactgatgccactgctgcacccactggcaaccagtttaaaatcagcctgagattctgtcgttttattcgcgatcttatccagacccatcttagggattctcaatgtgtagttattattgccatcattcgtgacgttattaccagtaagtgtgatgttacaggttgtcgctttgacagtggctgtaaactctacattaatatccgttgcaaatactgagggtgataataatattcccatcagtatcactattttatgtggcgttgtttttatcatttgacgtcccttgtagttactgaatctgacaccgaattccattcagaataatagattgtgctattttttctgcttctgggctttgttgataatgcgcaagacaacttacgggtttactttgttcgagccatttaatgctgatatttccctgctgctcaataccacgaacaaatgcttgtccaccctgtccaacattaccaatgacattgccttgctcatcataaatatctgcagcaaatggaatatttttaccatcacttcgtgtgatgttcataatggctgattgcccttgcacggtttcaaaatcagcaaagacgactgaaccctgacgcggtacagctactgcactggtactttttaattcaacatcgttctcaagatcgttgatatccagcgcgatacggttttcatgataaggagaaagagcgctggtgacaccataaccccatcgatcgatagtactgttgccataatttattcgcgctccttgagcacctggagcctgaactaccgccagtgtatcggagtcgctaaaactatcattactgaaagtcagtccaccgctatgcaatacaaaaccaccgtcggtgctgagagaaacttgacggctgttatcgctatttgcagaaattgaacctgccagcgttccccatggtgactcatagctggcataacccccaacataactcaaatctttgctggctttattcatcgtatagccagtattcacgctataactgacgcgagcgttatcgctatagccactgctgctaacgttgagttggttattacccttaaagtcactgcttatttgagtatcaatactctggaaacctgaagtacgttgttcagtgccaagtaatttttcaattggaatggtgaaactaagataaacgctatcgtcagtgtcgccgtcttcattccatgaacgctgggcactgacactgtagctgccccaggatgtactgttactgtagccaatagagtaattgctacgattttgtccggaagcccagtaatcggaccaacttccggaaagataaaatgaaccgtaatcttttttctcaaatttcaacggttggttaatactgaccgtaacctgatttttcatgcgtgagtaattacgcatggatttcggttcaagatcttgttcgggatgtttcacttcatcaattagagttagtgcatcattaagaccaaggtaattctgtgtcgaatagcgataggccgcgatattcagtgaagtacttgtttcttcgaataacttgttccaggaaacacgataactttgcccctggtatgttttatcatccgggatacgaacattggaatgagtcacatcgaaagaaaatgcaccaactgaagtattcagaccaagacctaacaaaccagcggtatagttattatcggttatctgaataccggtataacccgtcagatagttattcaggccgtagtagtagcttgcttgaaataaattaggctcatcctgaatatcatcttttaagacctgaccgccgctaatatcccaacgtccaacgccagggcgtaacatttgaacaacggatgagaaaggttgcgagaatgtccgctttgagccatcggattcttcgatggtaacaataagatcgctgccgtaccctgacggactcagatcatcaatgacgaaagcgcctggcggcaccgtcgtttcataaatcttatagccaccttgcgtaatagtgactttggcgttggtattggcaacgccatgaatgataggcgcaaagctggctaaagtcggaggcaacatgcggctgtcactgtataaacgaatgcctcggatactgacggaatcaaaggtttcgcccgtcgtataagactcaccaagaatgagttgagaacgcagcgaggcgatatcacgctgaacataccgattcttaaaatcataattactgccagaatcggtcatccagttgtagttgcccgaggcacgcagtcgccatgcacctaaattcatcccaccgttaaatgcagcataaatgctttcattttttcgaccaggggtttcactatgatatccgttgaggttgtatgacaacatggccgcattaatgccgttttcccataacgatggatcaacatagttttggtaatttttcattacccaggcttgaggaacgtctatatccagacgttgatcgttaacgtcataacgaacagaagcctgagggataatttccgtcaaattgaggcaattgccgagcgtttcatccctggcaagcagaacggctttttcgttatttatatcgggagaattaatatgaaactgcaataaattctttaatgtgatacaagcctgggcgttcttttttccttcaattgcgacaaatgtaatactttggttaatgattggttggtcgtttacataaacactgacgtcgtaaacacccggtatagcggggttaccttcactgtaccggctgagatcaatattagatgcattctgccccatcaggaaggtatggtcatattcaacgagttcagcactgaaagcagtattgcaatacagcagcgcgcaaaacgtggcgatacgggtcagatgatgataatttttagtatattctatagtcacgctatgcttcctgcggaattatatccttgcctgattacagcctggcattaccttcaattgcgccaccaaagtcattaatggcgtaaaaatgcacttttgcagaattcgctttgccattaaggccattgactttcatgacctcatcactaaatggtgcaatcattttcacatcaatcggatagcgtttaccgctagcttctaaatcaccactgctaaaagagacgtagtaaggggttggattggtcactcgtaatgacgccttaccttctgaacctgaccagaaccacttcagggctaacggggcttcagagggatttcccttcaatccatccgggcgatagaaaagttttatacgtgtgcgaaatgccagttgcagcaggctttgattcgcgaccttttctgcatctggttttggtggaacttccagtacgttaaaccagaacacgctctctctgtctttaggcagtgaggtgctggctgtgtacattaatttgattgtttgcccacgtttggcatcaatacgcgatactggcggcgtagcagtaaaagggactgtaatactgccaggctcagcgttgtcatcgccagtatctaaccaactctggacaagcaacgggttattccctttattttccagacgtacgttgacacttttttgatcgcttttatatattacgcgagtacccgaaatgacaatgtccgcaatagacgatgaactaaaagccatacaggttacgaagcataaagctgttgtatgtttggtgttaaaaaacataaaccatccctgatagagttaattaaaacagggaataatataaaatagaaattattattccctgtatattcattcaatcaatttaactggtgaatacttactgataagtaatggtgtatgcagtgttagtttttacataaccagcagttgctgtttggtctgcgacggcacgaacgtaagacgctttaaaatcataaacagcagattttgtcgttgcatccagggctttagtatacacatcgccagggttgttaatttgaacctgtttgatagtggaaccatcaatattgtgtagagcgatattaacgccgtcagatgggttgttaatagacatgtcgttgttcaaagtccctttgctgttaccaaagaaaacagaaccgaaggtcattttagccgtgctacctggattcggatttgctttgctgcagtcaacggtgatgctgaaaggtttagctttagcgccaacggtgtcattcagtacgccagcatcgatttcaccaacggttgcggtttgcagcaggatcagaccatccttgttaccgccgtcaacgcgggtttcacaggtgttatcaacaaccagaccactgatatttaactgaccgccgtccatatcagcagaagcagtacctgcaaccatcgccagcataagaccagacagggcaaaacctaattttttagacataaaaatcctttaataaaattccattagtcagactacatgtttgaagaatgactattcatgacacaaataggagaaacaaatgttagatattaatgagcaatgatatttgttacccaaatttacaaccattgttcattaggtcgcctattgtgcactttagaagcttttgaacaaattaaatttacttaattcaaaattaagtaaaaataagttcacaagtgcaattggttagggtatggagatgggattgatatttatttataggaagttatattatttccgcaaagagatgtttaaactaaaatcgtaattaaggaaagagatgagatatgattttcagaaaatatttatattcgcaatataaataaattaccatttgtttaatttgtcaaatgctcttgtatgtaagatttgacgcaacatctccccatcaggaaacaccaactccggcgcgatttcaaacagcggccacagcataaatccacgattcttcatatcgtagtgcggaacggtcaggcgttcagtatttatcacttcattaccaaacagcatgatgtcgagatccagcgtgcgtggtccccagcgttcagctttgcggacgcgaccttgctgcaattcaatacgctgtgtgtgattgagtagctcttcaggtgcaagagaggtttccagcgccacggctgcgtttaagtaatcgggttgatcttgcggccccagcggtggggtgcggtaaaacgaagaaacggtaagaatgtggctttcagggatatcgcctaatgctttcagggcagcattgacctgctccagcggagaggccagattgctgcctatggcaatatacgccactgtcatgcggtaccctcacgacgtggtgcgcgtttgcgtggacgacgagtacgacgacgcggtgacggttcttcatccagctcgttgagcatccctttttggtctggtggcgcggaaacctggaactcaccccaccatttcaccagacgctgcagttcagcgttacgctcaacttcagctcgcaaggccaacaggtcataagccgcacggaacttaggatgctccagcagtttccatgcgcgtttaccctgacgacgggacatacgcaactgcaactgccagatatcgcgggttaatgtcgtcagacgtttcgggattgccagtgaacggcaggcttcgtccagcacgtcgttcatcgccagcgcgaaagcgtcgtgataggtcaggccgctttcctgggcgatcttctgtgccgtctccagcagtgggtaccagaacatggcggcaaacaggaacgccgggttcacgcgcatatcgttatggatacgcgtatcggtattcttcagcacctgttcaatgatccgctccatcgggctgtcgccattttccgtgaagtagcgggtaatggtcgggaacagcggctggaacagatgatattcacacaacagcttataggtttcgtaaccgtagcccgcttgtagcagtttaagcgattcttcaaacaggcgtgccggtgggatatcgttcagcagggtagcgaggcgagggatcggttctgcggtttccgggctgatgcgcatacccaatttggcggcaaaacgtaccgcgcgcagcatacgtaccggatcttcacggtagcgcgtttccgggttaccaatcagacggataacgccgtccttcagatccttcatgccgccaacgtaatcacggacggtaaaatccgctacgctgtaatacaggctgttgatagtgaaatcgcggcgctgggcgtcttcttcgatggagccgaaaatgttgtcgcgcagcaacatgccgttttgcccgcgttgggaggtcgtgcggtcgctgacgttaccttcgtggtgtccacggaaggtcgcaacttcgataatctccgggccaaacattacatgagccagacggaaacggcgacccaccaggcggcagttacggaacagtttgcgcacctgctcaggcgtggcgttagtggttacgtcaaaatctttcggctttttgccaagtaacaggtcgcgcacgccgccgccaaccagccaggcttcgtatcccgctttattgagcctgtacattaccttcagggcattttcactgatatctttgcgggaaatagcatgctgctcacgcgggatcaccgtcacctgtggacgggcgactgcctgttcagcctcgctttcctcgcggcttagcaccttgcggcaaaaattagcgactcgggtaaaaatagtacacctcggtagtgtcaaacatcattcaggacaaaaaaatagcggctaatcatagctcagcatgacgcatttgagaatgttgaatttacaattgccgactcgggcacggcggtaagccgccagtttttgacggctgactgaaggatttgctcgacgctgaaatcctgccagtgtgcttctgcctgctgccccagaaattgaagtgccgcgattagtaccgggcgtggatcgcctttcggcaacgcaggcgcatgattctgcttggaaagtttagcgccttgtggattaagcgccagcggcagatgaatgtaatctggcactttccagccaaaaagctggtacagcgagatttgccttactgttggttcaatcagatcagccccacgcactatttctgtaacgccctggaaatgatcatcaaccacaacagccaggttgtaggcgaacaacccatcacggcgatgaatgataaaatcttcccgtgccagtttttcgtcggcgtgaataatgccgcgcagctggtcagtaaattgcgtgaccggatgctgctggcggatacgcactgcggcgttgtctggtccatgatgcaacacccggcaatgaccgtcgtaaataccgccaatgctttgaatacgcgcacgcgtacaggtgcagtaataacttagtccttgttcatgtaaccaggcgagtgcttcacgataggcgtcgtgacgttgcgattgccagagaacatcgccgtcccagtgcagaccgtaatgttccagctggcgcaggatagtttctgcggcaccgggaacttcacgaggcgggtcgatatcttctatgcgtaccagccagcgaccttgccgggcgcgagcctgcaaatagctgccgagcgcggcgatcagagagccaaaatgaagctcgccggaaggagagggggcgaagcggccaatatactgtgtgtctgtcatctctttgaacaaaaaataaggcgggagcatttcccgcctgtggtaaacgtgatggaacggctgtaattagccagccatctgtttttcgcgaatttcagccagcgttttgcagtcgatgcacagatcggctgtcgggcgcgcttccagacggcgaataccaatttcaacaccgcaggattcgcagtagccgaaatcttcgtcttccacttttttcagcgtcttctcgatctttttgatcagcttacgctcgcgatcgcggttacgcagttcgaggctgaactcttcttcctgggctgcacggtctaccgggtccgggaagttggctgcttcatcctgcatatgtgtaacggtgcgatcgacttcatccctgagttgattacgccatgcttccagaatacgacggaagtgcgccagctgggcttcattcatatactcttcgcccggcttctcctgatatggttccaccccagcgatggcgagaatactcagggacgatgttttacggttttgcccttcttgcatgttgcttctccttaacacgcactatcgatccccatgttcgggggaaaaatgaggccgctataaatagcagatgcttttccggatagcaattatctaaacgtaacacttgacaactgtgtgaggaaaagcgtatttgcgcacgcgaccagaatgtaaattaaccagttacttactttactacaatgtaaccggcagtgattttttaagagccatgccttcagcagaaatttccgctttgtaagccagaatttctacccccctctgttgagcttctgacaatagttgcgcgtatttctcatcgatgtggcgcgcgggtgaaaaccgtgtaatggctgaatgcagcacggcgaaaaagataaccgcacgctggccttcagccgctacgctcatcaactcccgaaggtgtttctgacctcgttcagtgaccgcatcgggaaaatatccctgttcgttctccgctaacgtaaccgatttcacttcaatatagcagtctggacgcgaatccgcctgcaacataaagtcaatacggctgcgttctgcgccgtattttacttcgcttttcagcgagctatagcctgacagttctgaaattgattcattaaggatagcctctttcgtcaacctgttagcccaaagcgtgttgacgcaaataaatgcgccgctctggctttgagttaattcccaggtgtgtgggtatttccgtttggtgttgtctgaagtcgaataccagacggtatcgccaggcgttgcacaaccggtcatcgcacccgtattcgggcagtgtagcgttaattcgcgaccatcgggtgtgatcacatcggctaaaaaacgtttgtaacgctgaattagcgtcgcgcgctgtagagggggagaaaattccattgcgacaatccttgttattgcgttagcgcccagcgttttagcggcgtgtagcgtgtgcgtccacgggcaaacgaggaggcgtaaagggtgaactccgtcaccgcatacgaccagttaaaacctggcggcgggattgtcaccgcctcgctggcgtcgcgcaataaggtaatatgtggatgaaacggacgattgctttgaaaacaaccgctgcgggcagcctgtgaacggagcatattcgccagctggattaagccgcgtggcggctgacgcatccctaaccacaccacacgcgaacgcagccattgtccggcgtcatcaagcgtgagtgtgaaaccaggttgacgaatccgtccggctaaaagagaaagcgccttctctttctcggcgctcacttcgcctaaaaatgccagagtcagatgcaaattatcggcggcgaccggacgtcccgcctcaggtgggaagtgtgtggcgcgccaatggataatctgttcgcggatttctgcaggtaagtcgatagcaaagaacagacgttgcggttcagacatgtgaggcactcggttatgaattaccgcgatgctacaatgtggcgcgaagaatgttaaccctctggagcgttttgtgtcgtcgttgcccgttgctgccgtcttacctgaattacttaccgctctcgattgtgcgccgcaggtattattaagtgcgccgaccggggccgggaaatcaacctggctgccgctgcaactgctggcgcatcccggcattaacgggaaaattatcctgctggagccgcgtcgtctggcggcgcgtaacgtcgcgcaacggctggcggagctgcttaacgaaaagccaggcgataccgttggctaccggatgcgtgcgcaaaactgcgtcgggccgaatacccgcctggaagtggttaccgaaggcgtgctgacgcgcatgatccagcgtgacccggaactgagcggtgttggactggtgatccttgatgaatttcatgagcgcagcttgcaggcggatttggcgttggcgctgttactcgatgtgcaacaaggtctgcgtgatgaccttaaactgctgattatgtcggctaccctggacaacgaccgcttgcagcaaatgctgccagaagcgcctgtcgtcatctcagaagggcgctcgtttccggttgaacgccgttatttaccgctgcccgcgcatcagcgttttgacgatgccgttgcggtagccaccgctgaaatgctgcgtcaggaaagcggatcattactgttatttttacctggcgtcggagaaattcagcgtgtgcaggaacaactggcttcgcgcatcggcagtgatgtattgctctgcccgctgtatggcgcgttgtcgctgaacgatcagcgaaaagcgatcctcccggcaccgcaagggatgcgcaaagtggtgctggcgaccaatattgctgaaaccagtttaaccattgaaggtattcgtctggtggtggattgtgcccaggagcgtgtggcgcgttttgatccgcgcacggggcttacgcgactgattactcaacgcgttagccaggcatccatgacgcagcgtgccgggcgcgccgggcgtctggagccgggtatcagcctgcatttaatcgccaaagaacaagcagaacgcgccgcggcgcaaagtgaaccggagatcttacaaagcgatctttccggtttgctgatggaattactgcaatggggatgcagcgatccggcgcagatgagctggctggatcaaccgccagtagtgaatctactggccgcgaaacgtctgttacaaatgctgggggcactggagggtgaacggcttagtgcgcaagggcaaaaaatggcagcgctgggtaacgatccgcgtttagcggcaatgctggttagcgcgaagaacgacgacgaagctgctaccgcggcaaaaattgccgccattctcgaagagccgccacggatgggcaatagtgacctgggcgtggcgttttcgcgcaatcaaccagcctggcagcaacgtagtcagcaactgttaaaacgcttaaacgtacgtggcggtgaggcagacagttcgcttatcgcgccgctacttgccggggcgtttgccgatcgcattgctcgtcgccgtgggcaagatggacgctatcaactggcaaacggcatgggagcgatgctcgatgccaacgacgcgctaagccgccacgaatggttgatcgcaccgttattattgcagggcagcgcctcgccggatgcgcggattttactggcgctgctggtcgatattgatgagttagtacaacgctgcccgcagctggtacagcagtctgacactgtggagtgggatgacgcgcaaggtacgctgaaagcctggcgtcggctacaaatcggtcagttgacggtgaaagtgcagccgctggcgaaaccgtcagaagacgagttgcatcaggcgatgcttaatggcatccgtgataaaggtttaagcgtgctcaactggacggcggaagcggaacagctacgcttgcgtttgttatgcgccgcaaagtggttgccggaatatgactggccagcggttgatgatgaaagtttattggcagcgctggaaacgtggctgctgccacatatgactggcgtacattcactacgcggcctgaaatcactcgacatttatcaggcactacgcggattacttgattggggaatgcagcaacgtctggatagtgaattgcctgcgcattacactgtgccgacgggaagccggatcgccattcgttatcatgaagataacccgcccgcgctggcggtgagaatgcaagagatgtttggcgaggccaccaatccgacgatcgcccaggggcgcgtgccgctggtgctggagttgctttcacctgcccaaaggccattacaaatcacacgagatttgagcgccttctggaaaggagcgtaccgtgaggtgcaaaaagagatgaaagggcgttatcccaaacatgtctggccggacgacccggcaaatactgcaccgacgcgacggacgaaaaagtattcgtaaggttggttttctccctctccctgtgggagagggccggggtgagggcatcagcgcgcacgttcaccctcaccctaaccctctccctcaagggagaggggaccgatcgagcacaaattttgagagatatcttcttctgtcttgtaacagaagaacagaaaatcgggcttttgcgcctgaatattgcggagaaaaagcatggccgggaatgaccgcgagccaattggacgcaaagggaaaccgacgcgtccggtcaaacaaaaggtaagccgtcgtcgttacgaagatgacgatgattacgacgattatgatgactatgaggatgaagaaccgatgccgcgcaaaggtaagggcaaaggcaaagggcgtaagcctcgtggcaaacgcggctggctatggctactgctaaaactggctatcgtttttgccgtgctgatcgccatttacggcgtttatctcgatcaaaaaattcgtagccgtattgatggcaaggtctggcaactgcctgcggcagtttatggccgaatggtcaatcttgagccagacatgaccatcagcaagaacgagatggtgaagctgctggaggcgacccagtatcgtcaggtgtcgaaaatgacccgtcctggcgaatttaccgtgcaggccaacagcattgagatgattcgccgtccgtttgatttcccggacagtaaagaaggacaggtgcgcgcgcgtctgacctttgatggcgatcatctggcgacgatcgtcaatatggagaacaaccgtcagttcggtttcttccgtcttgatccgcgtctgatcaccatgatctcttcgccaaacggtgagcagcgtctgtttgtgccgcgcagtggtttcccggatttgctggtggatactttgctggcgacagaagaccgtcatttttacgagcatgatggaatcagtctctactcaatcggacgtgcggtgctggcaaacctgaccgccggacgcacggtacagggtgcgagtacgctgacgcaacagctggtgaaaaacctgttcctctccagcgagcgttcttactggcgtaaagcgaacgaagcttacatggcgctgatcatggacgcgcgttacagcaaagaccgtattcttgagctgtatatgaacgaggtgtatctcggtcagagcggcgacaacgaaatccgcggcttcccgctggcaagcttgtattactttggtcgcccggtagaagagctaagcctcgaccagcaggcgctgttagtcggtatggtgaaaggggcgtccatctacaacccgtggcgtaacccaaaactggcgctggagcgacgtaatctggtgctgcgtctgctgcaacagcaacagattattgatcaagaactctatgacatgttgagtgcccgtccgctgggggttcagccgcgcggtggggtgatctctcctcagccagcctttatgcaactggtgcgtcaggagctgcaggcaaaactgggcgataaggtaaaagatctctccggcgtgaagatcttcactacctttgactcggtggcccaggacgcggcagaaaaagccgccgtggaaggcattccggcactgaagaaacagcgtaagttgagcgatcttgaaactgcgattgtggtcgtcgaccgctttagtggtgaagttcgtgcgatggtcggaggttctgagccgcagtttgcgggctacaaccgtgcgatgcaggcgcgtcgttcgattggttcccttgcaaaaccagcgacttatctgacggccttaagccagccgaaaatctatcgtctgaatacgtggattgcggatgcgccaattgcgctgcgtcagccgaatggccaggtctggtcaccgcagaatgatgaccgtcgttatagcgaaagcggcagagtgatgctggtggatgcgttgacccgttcgatgaacgtgccgacggtaaatctggggatggcgctggggctgcctgcggttacggagacctggattaaactgggcgtaccgaaagatcagttgcatccggttccggcaatgctgctgggggcgttgaacttaacgccaatcgaagtggcgcaggcattccagaccatcgccagcggtggtaaccgtgcaccgctttctgcgctgcgttcggtaatcgcggaagatggcaaagtgctgtatcagagcttcccgcaggcggaacgcgctgttccggcgcaggcggcgtatctgacactatggaccatgcagcaggtggtacaacgcggtacgggtcgtcagcttggggcgaaatacccgaacctgcatctggcagggaaaacagggactaccaacaataacgtagatacctggtttgcgggcattgacggcagcacggtgaccatcacctgggtcggccgtgataacaaccagccgaccaaactgtatggtgccagcggggcaatgtcgatttatcagcgttatctggctaaccagacgccaacgccgctgaatcttgttccgccagaagatattgcagatatgggcgtggactacgacggcaactttgtttgcagcggtggcatgcgtatcttgccggtctggaccagcgatccgcaatcgctgtgccagcagagcgagatgcagcagcagccgtcaggcaatccgtttgatcagtcttctcagccgcagcaacagccgcaacagcaacctgctcagcaagagcagaaagacagcgacggtgtagccggttggatcaaggatatgtttggtagtaattaacatctaagcgtgaaataccggatggcgagttgccatccggtaaaataacatcccatctaagatattaaccctttcttttcatctggttgtttattaacccttcaggaacgctcagattgcgtaccgcttgcgaacccgccagcgtttcgaatattatcttatctttataataatcattctcgtttacgttatcattcactttacatcagagatataccaatggcgcgttccaaaactgctcagccaaaacactcactgcgtaaaatcgcagttgtagtagccacagcggttagcggcatgtctgtttatgcacaggcagcggttgaaccgaaagaagacactatcaccgttaccgctgcacctgcgccgcaagaaagcgcatgggggcctgctgcaactattgcggcgcgacagtctgctaccggcactaaaaccgatacgccgattcaaaaagtgccacagtctatttctgttgtgaccgccgaagagatggcgctgcatcagccgaagtcggtaaaagaagcgcttagctacacgccgggtgtctctgttggtacgcgtggcgcatccaacacctatgaccacctgatcattcgcggctttgcggcagaaggccaaagccagaataactatctgaatggcctgaagttgcagggcaacttctataacgatgcggtcattgacccgtattatgctggaacgcgctgaaattatgcgtggcccggtttccgtgctttacggtaaaagcagtcctggcggcctgttgaatatggtcagcaagcgtccgaccaccgaaccgctgaaagaagttcagtttaaagccggtactgacagcctgttccagactggttttgactttagcgattcgttggatgatgacggtgtttactcttatcgcctgaccggtcttgcgcgttctgccaatgcccagcagaaagggtcagaagagcagcgttatgctattgcaccggcgttcacctggcgtccggatgataaaaccaattttaccttcctttcttacttccagaacgagccggaaaccggttattacggctggttgccgaaagagggaaccgttgagccgctgccgaacggtaagcgtctgccgacagactttaatgaaggggcgaagaacaacacctattctcgtaatgagaagatggtcggctacagcttcgatcacgaatttaacgacacctttactgtgcgtcagaacctgcgctttgctgaaaacaaaacctcgcaaaacagcgtttatggttacggcgtctgctccgatccggcgaatgcttacagcaaacagtgtgcggcattagcgccagcggataaaggccattatctggcacgtaaatacgtcgttgatgatgagaagctgcaaaacttctccgttgatacccagttgcagagcaagtttgccactggcgatatcgaccacaccctgctgaccggtgtcgactttatgcgtatgcgtaatgacatcaacgcctggtttggttacgacgactctgtgccactgctcaatctgtacaatccggtgaataccgatttcgacttcaatgccaaagatccggcaaactccggcccttaccgcattctgaataaacagaaacaaacgggcgtttatgttcaggatcaggcgcagtgggataaagtgctggtcaccctaggcggtcgttatgactgggcagatcaagaatctcttaaccgcgttgccgggacgaccgataaacgtgatgacaaacagtttacctggcgtggtggtgttaactacctgtttgataatggtgtaacaccttacttcagctatagcgaatcgtttgaaccttcttcgcaagttgggaaggatggtaatattttcgcaccgtctaaaggtaagcagtatgaagtcggcgtgaaatatgtaccggaagatcgtccgattgtagttactggtgccgtgtataatctcactaaaaccaacaacctgatggcggaccctgagggttccttcttctcggttgaaggtggcgagatccgcgcacgtggcgtagaaatcgaagcgaaagcggcgctgtcggcgagtgttaacgtagtcggttcttatacttacaccgatgcggaatacaccaccgatactacctataaaggcaatacgcctgcacaggtgccaaaacacatggcttcgttgtgggctgactacaccttctttgacggtccgctttcaggtctgacgctgggcaccggtggtcgttatactggctccagttatggtgatccggctaactcctttaaagtgggaagttatacggtcgtggatgcgttagtacgttatgatctggcgcgagtcggcatggctggctccaacgtggcgctgcatgttaacaacctgttcgatcgtgaatacgtcgccagctgctttaacacttatggctgcttctggggcgcagaacgtcaggtcgttgcaaccgcaaccttccgtttctaatttctcttttggggcacggatttccgtgcccatttcacaagttggctgttatgcaggaatacacgaatcattccgataccacttttgcactgcgtaatatctcctttcgtgtgcccgggcgcacgcttttgcatccgctgtcgttaacctttcctgccgggaaagtgaccggtctgattggtcacaacggttctggtaaatccactctgctcaaaatgcttggccgtcatcagccgccgtcggaaggggagattcttcttgatgcccaaccgctggaaagctggagcagcaaagcgtttgcccgcaaagtggcttatttgccgcagcagcttcctccggcagaagggatgaccgtgcgtgaactggtggcgattggtcgttacccgtggcatggcgcgctggggcgctttggggcggcagatcgcgaaaaagtcgaggaagctatctcgctggttggcttaaaaccgctggcgcatcggctggtcgatagtctctctggcggcgaacgtcagcgggcgtggatcgccatgctggtggcgcaggatagccgttgtctgttgctcgacgaaccgacctcggcgctggatatcgcccaccaggttgatgtgctgtcgctggtgcaccgtttaagtcaggagcgtggcctgacggtcattgccgtgttgcacgatatcaatatggcggcacgctactgtgattatctggtcgccctgcgcggcggtgaaatgattgctcagggaacgcctgcggaaattatgcgcggcgaaaccctcgaaatgatttatggcatcccgatgggtattttgccgcatccggcgggtgctgcacctgtgagttttgtttattgatgagcggcttacctcttatttcgcgccgtcgactgttaacggcgatggcgctttctccgttgttatggcagatgaataccgcccacgcggcggctattgatcccaatcgtattgtggcgctggagtggttgccggtggaattactgctggcgctcggcatcgtgccttacggcgtggcggataccatcaactatcgcctgtgggtcagcgaaccaccattgccggactcagtgatcgacgtcggtttgcgcacagaacctaaccttgaactgctgaccgaaatgaaaccatcgtttatggtctggtcggcaggatatggcccttcaccagaaatgctggctcgtattgcgccgggtcgcggatttaacttcagtgacggcaaacagccgttggcgatggcgcgtaaatcgctgacggaaatggcagatttacttaacctgcaaagcgcagcggaaacgcatttagcgcaatatgaagactttatccgcagcatgaaaccccgctttgtgaagcgtggtgcgcgtccgttattgctgacgacgcttatcgatccgcgccatatgctggtcttcggtccaaacagcttgttccaggaaattcttgatgagtacggcatcccaaatgcctggcaaggggaaaccaacttctggggcagtaccgccgtcagtatcgatcgtctggcggcgtataaagacgttgatgtgctctgttttgatcacgacaacagcaaagacatggatgcgctaatggcaacgccgctgtggcaggccatgccgtttgtccgcgccggacgctttcagcgcgtacctgcagtctggttttatggtgcgacgctctcggcaatgcactttgtgcgcgttctggataacgccatcggaggtaaagcgtgagtaaacgaattgcgcttttcccggcgttattgctggcgctgttagtgattgtcgctacggcgctcacctggatgaacttctcgcaggcgctgccgcgtagccagtgggcgcaggctgcctggtcgccggatattgacgtcatcgagcagatgatttttcactacagcttgttgccgcgtctggcgatttcgctgctggtgggcgcgggtctggggctggtgggcgtgctgtttcagcaagtgctgcgtaacccgctggcggagccgacgacgcttggcgttgctacaggcgcgcaactggggattaccgtcactacgctctgggcgatccctggtgcgatggcgagccagtttgctgcgctggcaggggcttgtgttgttggcttaattgtctttggcgtcgcgtgggggaaacggctgtcgccggtaacgctgattctcgcggggttggtagtgagcctttattgcggcgcaatcaatcagttactggttatcttccatcatgaccaactgcaaagcatgtttctgtggagcactggaacgctgacgcaaaccgactggggcggcgttgagcgtttatggccgcagctgctgggcggtgtgatgctgacgttgctgctacttcgtccgttaaccctgatggggcttgatgatggcgtggcgcgcaatctcgggctggccttgtcgcttgcgcgtctggcggcgctgtcgctggcgattgtcatcagtgcgctgctggtgaacgctgtggggattatcggctttatcgggttgttcgcgccgctgctggcaaaaatgctgggggcgcggcgtctgctgccacgactgatgctggcgtcgttgattggtgcgctgatcctctggctttccgatcaaatcatcctctggctgactcgcgtgtggatggaagtgtccaccggttcggtcactgcgttgatcggtgcgccgctgctactgtggctgttgccgcgtttacgcagcattagcgcgccggatatgaaggtcaacgatcgtgtcgcggctgaacgccaacatgtgctggcgtttgccctcgcgggcggcgtgctgctgttgatggctgtggtggtggcgctgtcgtttggtcgtgatgcgcacggctggacgtgggcgagcggggcgttgctcgaggatttaatgccctggcgctggccgcgaattatggcggcgctgtttgcgggcgtcatgctggcggaggcgggctgtattattcagcgactgaccggaaacccgatggcaagcccggaagtgctggggattagctccggcgcggcgtttggcgtggtgttgatgctgtttctggtgccgggtaatgcctttggctggctgttacctgcaggcagtctcggcgcggcggtgacgctgttgatcattatgatcgccgccggccgcggtggattttccccacaccgtatgttactggcggggatggcgttaagcaccgcgttcaccatgcttttgatgatgttgcaggcaagtggtgacccgcgaatggcgcaagtgctgacctggatttccggttcgacctacaacgcgaccgatgcgcaggtctggcgcaccggaattgtgatggtgattttgctggcgattaccccgctgtgccgccgctggctgaccattttaccgctgggtggtgataccgcccgagccgtaggaatggcgctgacgccgacgcgaattgcgctgctgctgttagcggcttgcctgacggcgaccgcgacgatgactattggaccgttgagttttgttggtttaatggcaccgcatattgcgcggatgatgggctttcgacggacgatgccacacatcgtaatttcggcgctggtgggtggtttactgctggtgttcgctgactggtgtgggcggatggtgctgtttccattccagatcccggcggggctgctgtcaacctttatcggcgcgccatattttatctatttgttgagaaagcagagccgttaatttttccatataacggccctgtacgcctggacggataaagcgtttacgcgacaacggatgcccgatgcgacgctggcgcgtcttatcgggcctacaaacggccccgaatcgtaggtcggataaggcgttcacgccgcatccgacaaaccatgctggatcacaacttcgcaaacacccgacgtgcagcatcgatggtgttattgatatcttccatgctgtgcgccacggacataaagcccgcttcaaacgctgacggtgccaggtaaacaccttcgcccagcatcatatggaagaaacgcttaaagcgttccacgtcacaggccatcacatcctgatagcacgtcacggactcggcgtcggtaaagaaaataccgaacatgccgccaacgtggttaacgaccagcggaattccggcttcttctgccgcttccagcagaccttctgccagacgtgttgtcagctcatccagcgtttcgtgaacgcccggctgcgcgacttcattcagacaggcgaaacccgctgccatcgcaatcgggttaccggaaagcgtacccgcctgatagaccggacccgtcggggccagcgcatccattacatcacgacgaccaccgaatgcgcctaccggcattccaccgccgatgattttgccgaggcaggttaaatctggcactacgccgtaataatcctgtgcgccagctagcgctacgcggaaaccggtcatcacttcatcgatgatcagcaacgcgccaaattcgtcgcacagcgcgcgcagacctggcaggaactctggcagcggcggaacacagttcatattgcctgccaccggctcgacgataatacaggcaatctcttgcgggtattgctcaaatgcggcgcgtacagaagccagatcattataagtacaggttaaggtatgtttggcgaaatctgccggaacgcccggcgagtttggctggcctaacgtgagtgcgccagaaccggctttcaccagcaggcagtcagcgtgaccatggtaacacccttcaaatttaataattttgtcgcgaccggtaaaaccacgggccaggcggatggcgctcatggtcgcttcagtgccggagttcaccatgcgcaccatatccatggtcgggaccagttcggtcaccagttgcgccattttcacttccatttcggttggtgcaccaaagcttaaaccacgctcggcggcttcaatcacggcattgcggattgccggatggttatggcccagcaccatcggcccccaggaaccgacataatcgatataggctttgccatcaacatcgtacagataagcgccgtccgctttttcgataaacagtggagtgccgcccacgccagtaaaggcgcgaacaggggagttcacaccgccagggatcagctcgcgcgctgcgctgtaaagattttcagacttactcatggagggttcctgattcgtagaaaaagtgaatggctgctattctatgttattcataacaagttaaatactcgtcaaacatcaggctgcttgtactggtgcaatcctgatttcttagagtataaaagttttgtgcatttgaaacattacgctttgcaaaggattttcatggaacgtgcgagtaaaatgccgtcatcttatttgtatgaccaataagtgatcattggatgaaaactgatactccctctttagaaacaccgcaggccgcgcgcctgcgacgcagacaactgattcgccaacttcttgagcgcgataaaaccccgttagccattttgtttatggcggcagtcgtcggcacgcttgttgggctggcagcggttgcttttgacaaaggtgtcgcctggttgcagaaccaacgtatgggggcgctggtacatactgctgataattatccgcttctgttaaccgtcgcttttctctgttcggcggtgctggcgatgtttggctactttttggtgcgcaaatacgcgccggaagcaggtggttcggggatcccggaaattgaaggggcgctggaagatcaacgtcccgttcgctggtggcgtgtattgccggtgaagttctttggcgggctggggacactcggcggaggcatggtgttggggcgcgaagggccaaccgtgcagatcggcggtaacattggccgtatggtgcttgatattttccgcctgaaaggtgacgaagctcgccatacgctgctggcaaccggtgctgctgcggggctggctgcggcctttaacgcgccgctggcgggtattttgtttattatcgaagagatgcgtccgcagtttcgctatacgttaatttcgattaaagcggtatttattggtgtcattatgtcgaccattatgtaccggatttttaatcatgaagttgcgttgattgacgtcggtaaactttctgatgcgccgcttaatacgctgtggctttatctgatcctcggtattatttttggcattttcggccctatttttaataaatgggtgctggggatgcaggatttgctgcaccgtgtgcacggcggcaatattaccaaatgggtgctaatgggcggtgcgattggcggtctgtgtggattgctggggtttgtggcaccagcaacgtcgggcggcggttttaacctgattcctatcgctaccgcggggaatttcagcatgggaatgctggtgtttatcttcgtcgcgcgggtcattaccaccttactctgcttctcttccggcgcgccgggcggtatttttgccccgatgctggcgctgggtactgtgctgggaaccgctttcggaatggttgccgttgagctgtttccgcaatatcaccttgaggcggggacgtttgctattgccggaatgggggcattactggcggcatctattcgcgcgccgttaacggggatcattctggttctggagatgaccgataactaccagctcattttgccaatgattattaccggtcttggcgcaacactattagcgcaatttaccggcgggaaaccgctatactcggcgattcttgcgcgcacgctggcaaaacaggaagctgagcaactggcgcgaagcaaggccgcatcagccagcgagaatacttgaacgaaataccagggtattagataatggcgattattattgggttagaatttgcccaattgccgatgtcgtttggagcaaaatatgagtgatgacgtagcactgccgctggagtttaccgacgcagcagccaacaaagttaaaagcctgatcgctgacgaagataacccgaatctgaaattacgcgtgtatatcaccggtggcggttgcagcggcttccagtatggtttcacctttgatgatcaggtgaacgaaggcgatatgaccatcgaaaaacagggcgttggcctggtggttgatccgatgagcctgcaatatctggtcggcggttccgttgattataccgaaggtctggaaggttctcgtttcatcgtgaccaacccgaacgcgaaaagcacctgcggttgcggttcttcctttagtatctaatctgttgttcatgtgccggataaactatccggcacatcttctctcttcaacgcccattctcatccagcgcaaacgtcggtagcttaagatgccaacgaatagccgccagccgaatcaatagcgtcacgaccatgcccatcatactggctgtttccagtggtacggaaaatgtgtaataagccgtagcgtggacaataccgccgataatacaggcagttgcgtagatttctgtacgtaaaatcatggggatttcgcgggccagaacatcacgaatgatcccgccgccaacgccagtaatgacgcccatacaaaccgcgattaacggaccggcttccgcattaaaggctttattcacgccaatgccgacaaacaccgccagaccaacggcgtccagcaccggcaacatccattttggtaagcgtcttggctggcgcaccagcacgatggtcagcatgctggtgaccattgcaacgaccagatcggtgggatctttcacccaaaataccgggccgtgatccagcgccatgtcgcgaattgtcccgccgcctactgcggttaccacgcccagtaccagaacaccaaaagggtccatacgcaattttccggctaacaaaacgccggagatggcaaataccgctgtgccgactatatccagccaatagacgagcattgttcaatccccactgagcacctgaaaaggtcaggcgctaatctacctgtgaaagcgcattacagagctgttgtgcagcgaggataatacgtgggcttgcacgttcaaaccagtcactcgtgagaggaataacgggaattttgagctgttcaccccagtattgtttgattttaggaatttggtccggtccgcctgtaatgacaatcgcctgtggcgagcgtgctaacacctgttcgcggctaacttgcggccagggaacccggctgtctttaaagatgttttctccgccacaaacttcgagtacctggttctgaatcgactcttttccactggtaaatggcggattaatgccgaattgcagaaaaacacgttttttaggtttatcagcatattgcgctttcaattgcgcgtactgatccagcagggattgcgcggcttgttcggccttgtctggttgcggactccagggggccagttgacgtaacgcattggcaatttgttcaatgcttgtcgcatcgacccacatcacttttattcccagcgaagccagctggtcaacctgccgctcggcattacctccacgccaggcaatcaccagatcgggtttcagcgcgacaatgcgttccagattcatcccctgccaggtggaaacctgctcaatcttttgcgcttgtggaggatagtcggaatagctgctgaccccaaccggcgtgatcccggcggcaaaggcaagttcagtgttggcgggagaaagcgtgatgacgcgcggcgcggcgttgagccacagtggcgcaagaaaagacagggcgaccagcgccctgaacagtgacttagccatgtgcaagtttctgcaccagtgactcaaccatcaggctggactgtttagcggcaacagccaggaactcatcgaagctaagatgagactgttgatcggccacgtcggagatggcgcgtacgacaacaaacgggacgttgaaattgtggcagacatgggcgattgccgtcgcttccatctctacagcaatggcctgtgggaagttgtggcggattttcgccagaccaacagaaccgttgatgaaagcgtcgccgctaacaatcaggccacgtacagcgttaagattcagttcggcaatgcaggcctcagcggcagcgatcagtttatcgtcagctttaaagcctgccggacagcctggtaactgaccgtattcataaccaaatgccgtgacatccgcgtcgtgataacgtgcttcgtccgagacaacgatatcgcccactttcaacgttggtgccaggccaccggcagaaccggtgttaataatcacatctggcttgcagtgttccaacagcaaagtggcacccagcgccgcagcgactttaccgatgcccgatttcagaagcgcaacctcggttccattcagttggccggtatagatttcgcaaccgccgagactgatagtttgacggttttcgattttgtcacgcagcagcgtaacttcttcttccattgcaccaatgatgccgattttcatagatttactcgcgataagcccgatttgaaggcatagtttaccatgcgcttacggggaagcgtatttctcacgcgggagaggacatggcacagattgatttccgaaaaaaaataaactggcatcgtcgttaccgttcaccgcagggcgttaaaaccgaacatgagatcctgcggatcttcgagagcgatcgcgggcgtatcatcaactctccggcaattcgtcgtctgcaacaaaagacccaggtttttccactggagcgcaatgccgccgtgcgcacgcgtcttacccactcgatggaagtccagcaggtggggcgctacatcgccaaagaaattttaagccgtctgaaagagcttaaattactggaagcatacggcctggatgaactgaccggtccctttgaaagcattgttgagatgtcatgcctgatgcacgatatcggcaatccgccgtttggtcattttggcgaagcggcgataaatgactggtttcgccaacgtttgcacccggaagatgccgaaagccagcctctgactgacgatcgctgcagcgtggcggcactacgtttacgggacggggaagaaccgcttaacgagctgcggcgcaagattcgtcaggacttatgtcattttgaggggaatgcacaaggcattcgcctggtgcatacattgatgcggatgaatctcacctgggcacaggttggcggtattttaaaatatacccgtccggcgtggtggcgtggcgaaacgcctgagacacatcactatttaatgaaaaagccgggttattatctttctgaagaagcctatattgcccggttgcgtaaagaacttaatttggcgctttacagtcgttttccattaacgtggattatggaagctgccgacgacatctcctattgtgtggcagaccttgaagatgcggtagagaaaagaatatttaccgttgagcagctttatcatcatttgcacgaagcgtggggccagcatgagaaaggttcgctcttttcgctggtggttgaaaatgcctgggaaaaatcacgctcaaatagtttaagccgcagtacggaagatcagttttttatgtatttacgggtaaacaccctaaataaactggtaccctacgcggcacaacgatttattgataatctgcctgcgattttcgccggaacgtttaatcatgcattattggaagatgccagcgaatgcagcgatcttcttaagctatataaaaatgtcgctgtaaaacatgtgtttagccatccagatgtcgagcagcttgaattgcagggctatcgggtcattagcggattattagagatttatcgtcctttattaagcctgtcgttatcagactttactgaactggtagaaaaagaacgggtgaaacgtttccctattgaatcgcgcttattccacaaactctcgacgcgccatcggctggcctatgtcgaggctgtcagtaaattaccgtcagattctcctgagtttccgctatgggaatattattaccgttgccgcctgctgcaggattatatcagcggtatgaccgacctctatgcgtgggatgaataccgacgtctgatggccgtagaacaataaccaggcttttgtaaagacgaacaataaatttttaccttttgcagaaactttagttcggaacttcaggctataaaacgaatctgaagaacacagcaattttgcgttatctgttaatcgagactgaaatacatgaaaaaaaccacattagcactgagtgcactggctctgagtttaggtttggcgttatctccgctctctgcaacggcggctgagacttcttcagcaacgacagcccagcagatgccaagccttgcaccgatgctcgaaaaggtgatgccttcagtggtcagcattaacgtagaaggtagcacaaccgttaatacgccgcgtatgccgcgtaatttccagcagttcttcggtgatgattctccgttctgccaggaaggttctccgttccagagctctccgttctgccagggtggccagggcggtaatggtggcggccagcaacagaaattcatggcgctgggttccggcgtcatcattgatgccgataaaggctatgtcgtcaccaacaaccacgttgttgataacgcgacggtcattaaagttcaactgagcgatggccgtaagttcgacgcgaagatggttggcaaagatccgcgctctgatatcgcgctgatccaaatccagaacccgaaaaacctgaccgcaattaagatggcggattctgatgcactgcgcgtgggtgattacaccgtagcgattggtaacccgtttggtctgggcgagacggtaacttccgggattgtctctgcgctggggcgtagcggcctgaatgccgaaaactacgaaaacttcatccagaccgatgcagcgatcaaccgtggtaactccggtggtgcgctggttaacctgaacggcgaactgatcggtatcaacaccgcgatcctcgcaccggacggcggcaacatcggtatcggttttgctatcccgagtaacatggtgaaaaacctgacctcgcagatggtggaatacggccaggtgaaacgcggtgagctgggtattatggggactgagctgaactccgaactggcgaaagcgatgaaagttgacgcccagcgcggtgctttcgtaagccaggttctgcctaattcctccgctgcaaaagcgggcattaaagcgggtgatgtgatcacctcactgaacggtaagccgatcagcagctttgccgcactgcgtgctcaggtgggtactatgccggtaggcagcaaactgaccctgggcttactgcgcgacggtaagcaggttaacgtgaacctggaactgcagcagagcagccagaatcaggttgattccagctccatcttcaacggcattgaaggcgctgagatgagcaacaaaggcaaagatcagggcgtggtagtgaacaacgtgaaaacgggcactccggctgcgcagatcggcctgaagaaaggtgatgtgattattggcgcgaaccagcaggcagtgaaaaacatcgctgaactgcgtaaagttctcgacagcaaaccgtctgtgctggcactcaacattcagcgcggcgacagcaccatctacctgttaatgcagtaatctccctcaaccccttcctgaaaacgggaaggggttctccttacaatctgtgaacttcaccacaactccatacatcttcatcatcctttaggcatttgcacaatgccgtacgttacgtacttccttatgctaagccgtgcataacggaggacttatggctggctggcatcttgataccaaaatggcgcaggatatcgtggcacgtaccatgcgcatcatcgataccaatatcaacgtaatggatgcccgtgggcgaattatcggcagcggcgatcgtgagcgtattggtgaattgcacgaaggtgcattgctggtactttcacagggacgagtcgtcgatatcgatgacgcggtagcacgtcatctgcacggtgtgcggcaggggattaatctaccgttacggctggaaggtgaaattgtcggcgtaattggcctgacaggtgaaccagagaatctgcgtaaatatggcgaactggtctgcatgacggctgaaatgatgctggaacagtcgcggttgatgcacttgttggcgcaggatagccgtttgcgggaagaactggtgatgaacctgattcaggcagaggagaatactcccgcacttactgaatgggcgcaacggctggggatcgatctcaatcaaccgcgagtggtggctattgttgaggtcgacagcggtcagcttggcgtggacagcgcaatggcggagttacaacaactgcaaaacgcgctgactacgcccgagcgtaataatctggtggcgattgtctcgctaaccgaaatggtggtgttgaaaccggcgttgaactcttttgggcgctgggatgcagaagatcatcgtaagcgagttgaacaactgattacccgcatgaaagagtacggccagctgcgttttcgcgtttcactgggcaactattttaccggtcctggcagtattgcccgatcctatcgtacggcgaaaacgacgatggtggtgggtaaacagcggatgccagaaagtcgctgctatttttatcaggatctgatgttacctgtgttactcgacagtttgcgtggcgactggcaggccaacgaactggcgcgaccgctggcgcggctgaaaacgatggacaataacggcttgctgcgacgaacgctggcggcgtggtttcgccacaatgtgcaaccgctggcaacgtcaaaggcgttgtttattcatcgtaataccctggagtatcggcttaatcgtatatcggaactgaccgggcttgatttgggcaattttgatgacaggttgctgctgtatgtggcgttacaactggatgaagagcggtaggttatgcgttaaggttgaggcggcgctggctcattcccctcagcccgaagggtagaggggaatgcccgaattaaccgtcagttcgggattatttacgcgttagtttttccagatcggcttcaatctcgctgatcttattggttacgactgactccaggtgacgtaagtcgtcgaggatcttacgcttaagatcaacttcgctgcggtcacgctggcagatttgatcaagctcatcaatgatataccgtagattcgggctgatttcctggacttctttataaccctgacccacaccatcagcgacgaccgttttacgctgacgcggatatttaaacttaacgctcttggcgaaaaactcgcctttgtctttctggaaatagattttcagaatatcgttgttggcttcctgccggaggctgtaacgatcaatttcttcaggattggtaatacccagacttttcagattgtcgtacatagcgttacctcaaaatgagtcagtaaattgtgcttattttagcatttggcctggcccgcccggctcgactgtgatcgcagaaagcctttttcttccagacttctatcatggcgtaaaaatcaaaaaattacctgctttattctggtgataaaattcacgatctacaccagttccagcatcgttacttccgggcggcagttcagacgcaaaccatacaaactgcccacgccacgggttgtgtagatgtgtctttcgccaaaggcatttaatccggcgacgtaacgtttatcttcgacaggggcaaaaggttcaccaaccaacggtacgcgcagttgcccgccgtgagtatggccgcacagcatcagatcccagggttcatcacgcatgacttctttgctgtcgggattatgcgccagcaccagtcttggcagattggcttcgctggcgggaggcggtttgcattgtccggcccataagtcaccagtgcctaccagttcgaattgcctgttcggcgtggcgatcaccgtagcctggttaaacaacaccgtgatgcccgctgatttcaacgtctcgccaattaagtgatttttttctgtaccaacagggcgatcgtggttgccgaagcaggcaaacgtcggcgcacattcggcaaggggggagagtacgtcactaaacgccgaaaaattcagcgacatatcaaataatacgtaatcgccgcccagtaatatcaaatcgggcttttgttctatgccaagagcaatcgcgtcagaaatcaggcttaaaggaacaaaacgagagtaatggagatcggccagaaaaagaattttgaatggtgctgcgttgtctttaaaaaaggcgaggcggtgacggattaattcaaaccagcctggctcacagtaatgcatataaccgaaacctgagctcgtggctatcgtcgcggcagtagcctgcaaaaatcggcggcgtgaaatcatcgctcatccctgcaaaaaaatcgggcagcgtcgtgctgcccgtgtgcatacttttagtcgatggtacgcagcagttcgttaatgccgactttgccgcgagttttcgcgtcaactttcttaacgataaccgcacagtagaggctgtatttgccatcttttgacggcagattacctgaaacaaccacagaccccgccggaacgcgaccgtagtggatttcgccggtttcacggtcgtaaatacgggtgctctgaccaatgtatacgcccatggaaatgacggaaccttcttcgacaatcaccccttcaaccacttcagagcgcgcgccgatgaagcaattatcttcaatgatggttgggttagcctgcagcggttccagcacgccgccgatgcccacgccaccggaaaggtggacgtttttaccaatctgcgcacaagaaccgacggtcgcccaggtatcaaccatggtgccttcatcaacatatgcgccgatgttgacgtaagacggcatcagcacggtgttacgggcaataaacgcaccctgacgtaccgccgctggtggcacaacgcggaagccttctttctggaaacgtgcttcgtcgtagtcggcgaatttcatcggcactttgtcgaagtagcggctttctgccccttcgatcacctgattatcattaatacggaaagagagcagcaccgcttttttcaaccactgatgcgtcacccactgaccgtcaattttttccgctacacgcagtgcgccggaatccagcagggcgatcacctgatttaccgcttcgcgggtaacggtgtctgcattggctggcgtgatctcggcacggcgttcaaaagcggtttcaataatgttctgtaactgctgcattgttaaactcttttcatatcagtaaacacatcaccctttatcgtttggattgagggcctctgtcaaccgctgatgcacttcctgctgcaactcgttattaagcgcacgccggtcagcggtggcaattatgaataaatcttctactcgctcgccaatggttgtaattcgggcaccatgaagcgaaattcccagatcggcaaaaattttcccgactcgcgccagcagtccaggttggtcgagggcgatcagttcgaggaacgatttgcggtcggtatgggtcggcaaaaacgttacttcggtttcaacagtaaaatggcgtaatttggcgggttggcgacggggctgcggtggctgccagctactttgcgtcagtacttgctccagaccaaaccgaataacctcatgacgatctgcggacagcgggttgccatcgggttccagcacgataaaggtatccatcgccataccgtcgcgagtggtgaaaatttgtgcgtcgtgaacacttaaattgcggcggtctaattcggcacagacggcggcaaacagataagggcggtccgggctccagataaaaatctcggtgcctccacgcgtagcctgcgggctaagcaataccagcggtttgcttaaatcatgctgtaataaatggcgggcatgccaggccagttgatttgggctatggcggacaaaatagttagcacgacagcgtgaccaaatttggtgcagcgcctcttcgtcgatgttatccatgcgcagtagtgccagtgcctggagttggtgatggcgaacccgttcgcgcatatccggcgtgttttgcattccgcgtcgtagctgcttttcggtggcaaagtagagctcacgcaacagactttgcttccagctattccacagcgtttcgttggtggcgcaaatgtcagccacagtcaggcataccagatagcgcagacgattttccgtttgcacttcttcggcaaactgcttgatgacttccgggtcctgaatatcgcggcgttgggcggtcaccgacatcaacaggtgctggcgaaccagccaggcgaccagctgtgtttcgcgtgagttcagcccgtggagttcggcaaaatgcactacatcctgagcaccgagaatggagtggtcgccgccgcgtcctttggcgatatcgtgaaacagcgcggcgatgaaaatcagctcagttgacggcaggcgcggccagacgtccacacacaacggatggcgctggcgcgtttcttcactggcaaaactctccagtttcagcatcacgcggatagtatgttcatccaccgtgtaggcgtggaacagatcaaactgcatctgcccgacgatatgcgaccattgcggcatatacgcgccgagcacgctatggcgatgcattggcaatagcccgcgccgcaccgctccggggtgacgcagaatgctcaaaaacagttttcgtgcttccggaatattacacagcggttgttgcagatggcgacgggcatggcgtaactggcgcagcgtggtggagtaaatgccggtgatcgcactgttgtgcaccatggtgtagaacatacgcaagatggcttccggctggcgcataaatagtgtttcatcacgcaggtcgattagcgtaccgcgtagctgaaactcatcgtcgattggacgtggtttttcgtcggcgggaagggcgaggatggcttcatcgaacagttgcagcagcatctggttgagttcactgacgcggcgtgtaacgcggaagtaatccttcatcatccgctcgaccggttcgttaccttcaccactgtaattcagacgctgggcgacgctaagctggcgatcgaataacaggcgattatcgtaacggctgacgaccagatgcagggcaaagcgaatacgccacaatatatgcagacattcgtttaattccgcccgctccgctgaggttaagaagccaaacccgaccatttcatccagcgatgttgcgccaaaatgacggcgggccacccattgcagagtgtggatatcgcgcaagccgccagggctgcttttgatgtctggttcaaggttgtagctggtgccatggtaacgctgatggcgctggttctgttcttcaactttcgccgcgtagaacttgtcggaaggccagaatccttcgctgaaaatatgtttttgcagttcgaggaacagcgcaacatcgccaattaataagcgggattcgattaaattggtggcgacggttaaatccgataacccttccagcatgcactcttcaagcgtgcgcacgctatgaccgacttccagctttacatcccagagcagcgttaacagctcgcccactttttgcgcctgatcgtccgggagctttttacggcttaaaatcagtaaatcgacgtctgaaagtggatgcagctcgccacgaccgtagccaccgacggcgaccaatgccaggtcggcaatctggctgaatcccgcttcaatccataatcgttgcaggagctggtcgataaactcggtgcgcgcctcaatcaactgttctgcagagatcccattgtcaaaggcatcacccagccaacgctggaaagtatcgatatgggcttttatcccaccgacggttaattcatcacggggccagacgcatggattttgcggttgaccgggcagggtggggagagcggtgtttgcgtactgttctggaagggtattcattgtgcgccacccataagattaaattatcgcattaaaaaagccggcattcgccggcttcatcttattcgtcgtgcgagattatcgccgggatggtgtcatccttgcgtagcgtcagaatttcgcagccgttatcagtcaccacaatagtatgctcatattgtgcagacaagctgcgatctttggtttttaccgtccagccatctttcatggtgcggatctcttttttacccgcgttgaccattggctcgatggtgaacgtcatcccaggtttcagtacgacgttggtttcacgggagtcatagtgcagcacctgcggttcttcatggaagccgcgaccaataccgtgtccgcaatattcacgaacgacggagaagccttctgcttcgacaaatttctgaatcgccgcaccgatttcgcgcagattaatgcctggttttaccatgcgtagcgccaggtacaggctttcttgcgtgatgcggcacagacgttcgcccatgatggtcggcttaccgacgataaacattttcgaggtatcgccgtggaaaccatctttgattacggtgacatcaatgttaacgatatcgccatctttcagcagcttagcatcgtccgggataccgtggcacaccacttcattaatagagatgcaaacggatttcggatagccgtgatagccgaggcaggcagaaaccgcgtgttgttcattaacaatgtaatcattacagatgcgatccagctcgccggtgctgacgcccggtttaacatacggttcgatcatctccagcacttcggcagccagtcggccagcgacgcgcattttttcgatatcttctggggtcttgattgagatagccattaattctgtccatcagcgtcggtgataccgacaatatatatgtaagtgccgtcaatggtatcacacccgggcaaattgagaatcattctgaatttcgccaaacgtgccactgaaggttttctataatagaaaattcgacgtctgatgctgtacacagcgccaacaattattggtgtccacgacgtatttgtggtataaagcgcgccggacttccgatccatttcgtatacacagactggacggaagcgacaatctcactttgtgtaacaacacacacgtatcggcacatattccggggtgccctttggggtcggtaatatgggatacgtggaggcataaccccaacttttatatagaggttttaatcatggcaactgtttccatgcgcgacatgctcaaggctggtgttcacttcggtcaccagacccgttactggaacccgaaaatgaagccgttcatcttcggtgcgcgtaacaaagttcacatcatcaaccttgagaaaactgtaccgatgttcaacgaagctctggctgaactgaacaagattgcttctcgcaaaggtaaaatccttttcgttggtactaaacgcgctgcaagcgaagcggtgaaagacgctgctctgagctgcgaccagttcttcgtgaaccatcgctggctgggcggtatgctgactaactggaaaaccgttcgtcagtccatcaaacgtctgaaagacctggaaactcagtctcaggacggtactttcgacaagctgaccaagaaagaagcgctgatgcgcactcgtgagctggagaaactggaaaacagcctgggcggtatcaaagacatgggcggtctgccggacgctctgtttgtaatcgatgctgaccacgaacacattgctatcaaagaagcaaacaacctgggtattccggtatttgctatcgttgataccaactctgatccggacggtgttgacttcgttatcccgggtaacgacgacgcaatccgtgctgtgaccctgtacctgggcgctgttgctgcaaccgtacgtgaaggccgttctcaggatctggcttcccaggcggaagaaagcttcgtagaagctgagtaataaggcttgataactcccccaaaatagttcgagttgcagaaaggcggcaagctcgagaattcccgggagcttacatcagtaagtgaccgggatgagcgagcgaagataacgcatctgcggcgcgaaatatgaagggggagagcccttatagaccaggtagtacacgtttggttagggggcctgcatatggccccctttttcacttttatatctgtgcggtttaatgccgggcagatcacatctccgaggattttagaatggctgaaattaccgcatccctggtaaaagagctgcgtgagcgtactggcgcaggcatgatggattgcaaaaaagcactgactgaagctaacggcgacatcgagctggcaatcgaaaacatgcgtaagtccggtgctattaaagcagcgaaaaaagcaggcaacgttgctgctgacggcgtgatcaaaaccaaaatcgacggcaactacggcatcattctggaagttaactgccagactgacttcgttgcaaaagacgctggtttccaggcgttcgcagacaaagttctggacgcagctgttgctggcaaaatcactgacgttgaagttctgaaagcacagttcgaagaagaacgtgttgcgctggtagcgaaaattggtgaaaacatcaacattcgccgcgttgctgcgctggaaggcgacgttctgggttcttatcagcacggtgcgcgtatcggcgttctggttgctgctaaaggcgctgacgaagagctggttaaacacatcgctatgcacgttgctgcaagcaagccagaattcatcaaaccggaagacgtatccgctgaagtggtagaaaaagaataccaggtacagctggatatcgcgatgcagtctggtaagccgaaagaaatcgcagagaaaatggttgaaggccgcatgaagaaattcaccggcgaagtttctctgaccggtcagccgttcgttatggaaccaagcaaaactgttggtcagctgctgaaagagcataacgctgaagtgactggcttcatccgcttcgaagtgggtgaaggcatcgagaaagttgagactgactttgcagcagaagttgctgcgatgtccaagcagtcttaattatcaaaaaggagccgcctgagggcggcttctttttgtgcccatcttgtaaattcagctaacccttgtggggctgcgctgaaaagcgacgtacaatgtcgctagtattaattcatttcaatcgttgacagtctcaggaaagaaacatggctaccaatgcaaaacccgtctataaacgcattctgcttaagttgagtggcgaagctctgcagggcactgaaggcttcggtattgatgcaagcatactggatcgtatggctcaggaaatcaaagaactggttgaactgggtattcaggttggtgtggtgattggtgggggtaacctgttccgtggcgctggtctggcgaaagcgggtatgaaccgcgttgtgggcgaccacatggggatgctggcgaccgtaatgaacggcctggcaatgcgtgatgcactgcaccgcgcctatgtgaacgctcgtctgatgtccgctattccattgaatggcgtgtgcgacagctacagctgggcagaagctatcagcctgttgcgcaacaaccgtgtggtgatcctctccgccggtacaggtaacccgttctttaccaccgactcagcagcttgcctgcgtggtatcgaaattgaagccgatgtggtgctgaaagcaaccaaagttgacggcgtgtttaccgctgatccggcgaaagatccaaccgcaaccatgtacgagcaactgacttacagcgaagtgctggaaaaagagctgaaagtcatggacctggcggccttcacgctggctcgtgaccataaattaccgattcgtgttttcaatatgaacaaaccgggtgcgctgcgccgtgtggtaatgggtgaaaaagaagggactttaatcacggaataattcccgtgatggataaataagggtaagattccgcgtaagtatcgcgggggcgtaagtctggttataaggcgttattgttgcaggcagtttggtcacggccagcgcgcagcaaccggagcgtacaaaagtacgtgaggatggcgagcactgcccggggccaaaatggcaaataaaatagcctaataatccagacgattacccgtaatatgtttaatcagggctatacttagcacacttccactgtgtgtgactgtctggtctgactgagacaagttttcaaggattcgtaacgtgattagcgatatcagaaaagatgctgaagtacgcatggacaaatgcgtagaagcgttcaaaacccaaatcagcaaaatacgcacgggtcgtgcttctcccagcctgctggatggcattgtcgtggaatattacggcacgccgacgccgctgcgtcagctggcaagcgtaacggtagaagattcccgtacactgaaaatcaacgtgtttgatcgttcaatgtctccggccgttgaaaaagcgattatggcgtccgatcttggcctgaacccgaactctgcgggtagcgacatccgtgttccgctgccgccgctgacggaagaacgtcgtaaagatctgaccaaaatcgttcgtggtgaagcagaacaagcgcgtgttgcagtacgtaacgtgcgtcgtgacgcgaacgacaaagtgaaagcactgttgaaagataaagagatcagcgaagacgacgatcgccgttctcaggacgatgtacagaaactgactgatgctgcaatcaagaaaattgaagcggcgctggcagacaaagaagcagaactgatgcagttctgatttcttgaacgacaaaaacgccgctcagtagatccttgcggatcggctggcggcgttttgctttttattctgtctcaactctggatgtttcatgaagcaactcaccattctgggctcgaccggctcgattggttgcagcacgctggacgtggtgcgccataatcccgaacacttccgcgtagttgcgctggtggcaggcaaaaatgtcactcgcatggtagaacagtgcctggaattctctccccgctatgccgtaatggacgatgaagcgagtgcgaaacttcttaaaacgatgctacagcaacagggtagccgcaccgaagtcttaagtgggcaacaagccgcttgcgatatggcagcgcttgaggatgttgatcaggtgatggcagccattgttggcgctgctgggctgttacctacgcttgctgcgatccgcgcgggtaaaaccattttgctggccaataaagaatcactggttacctgcggacgtctgtttatggacgccgtaaagcagagcaaagcgcaattgttaccggtcgatagcgaacataacgccatttttcagagtttaccgcaacctatccagcataatctgggatacgctgaccttgagcaaaatggcgtggtgtccattttacttaccgggtctggtggccctttccgtgagacgccattgcgcgatttggcaacaatgacgccggatcaagcctgccgtcatccgaactggtcgatggggcgtaaaatttctgtcgattcggctaccatgatgaacaaaggtctggaatacattgaagcgcgttggctgtttaacgccagcgccagccagatggaagtgctgattcacccgcagtcagtgattcactcaatggtgcgctatcaggacggcagtgttctggcgcagctgggggaaccggatatgcgtacgccaattgcccacaccatggcatggccgaatcgcgtgaactctggcgtgaagccgctcgatttttgcaaactaagtgcgttgacatttgccgcaccggattatgatcgttatccatgcctgaaactggcgatggaggcgttcgaacaaggccaggcagcgacgacagcattgaatgccgcaaacgaaatcaccgttgctgcttttcttgcgcaacaaatccgctttacggatatcgctgcgttgaatttatccgtactggaaaaaatggatatgcgcgaaccacaatgtgtggacgatgtgttatctgttgatgcgaacgcgcgtgaagtcgccagaaaagaggtgatgcgtctcgcaagctgaggataatccggctacagagagtcgcgctatttgttagcgtagggcttcagtgatatagtctgcgccatctgatcgtaagtagttggctttataaggtcaggtatgccgtggttttacacggcttttttttgtataggcttcagtattcctgagtaccgtaaaccctgtcagggaataaaaaacgcgtgatgttgtctgctactcaaccacttagcgaaaaattgccagcgcatggctgccgtcatgttgcgatcattatggacggcaatggtcgctgggcaaaaaagcaagggaagattcgtgcctttgggcataaagccggggcaaaatccgtccgccgggctgtctcttttgcggccaacaacggtattgaggcgttaacgctgtatgcctttagtagtgaaaactggaaccgaccagcgcaggaagtcagtgcgttaatggaactgtttgtgtgggcgctcgatagcgaagtaaaaagtctgcaccgacataacgtgcgtctgcgtattattggcgataccagtcgctttaactcgcgtttgcaagaacgtattcgtaaatctgaagcgctaacagccgggaataccggtctgacgctgaatattgcggcgaactacggtggacgttgggatatagtccagggagtcaggcaactggctgaaaaggtgcagcaaggaaacctgcaaccagatcagatagatgaagagatgctaaaccagcatgtctgtatgcatgaactggcccctgtagatttagtaattaggactgggggggagcatcgcattagtaactttttgctttggcaaattgcctatgccgaactttactttacagatgttctctggcccgatttcgatgaacaagactttgaaggggcgttaaatgcctttgctaatcgagagcgtcgtttcggcggcaccgagcccggtgatgaaacagcctgatgggggtcgcttttgctgaagtatcgcctgatatctgcttttgtgttaatacccgtcgtcatcgcggcgttgtttctgttgccgccggtggggttcgccattgtaacgctggtggtctgcatgctggcagcgtgggaatggggacagcttagcggttttaccactcgttcgcagcgagtatggttggcggtgttatgcgggttattgttggcgctgatgctttttctgttgccggaatatcaccgaaatattcatcaaccgctggttgaaatctcactttgggcttcgctgggttggtggattgtcgcgctattgctggtgctgttttacccaggttccgcagcaatctggcgtaactctaaaacattgcgccttatttttggcgtgctaaccattgttcccttcttctggggcatgctggcgttacgggcctggcactatgacgagaatcattacagtggcgcaatatggctgctctatgtcatgatcctggtatggggcgctgactccggcgcatatatgtttggcaaattgtttggtaaacataagctggcaccgaaggtttctccgggtaaaacctggcaaggctttatcggtggactcgctactgcagcggtaatctcatggggttatggcatgtgggcgaatctcgacgtcgctcccgtcaccttactcatttgctctattgtcgcagcgttagcctcagtgctcggcgatctgaccgagagtatgtttaagcgtgaagcaggaattaaggacagcggtcatttaattccaggacacggtggtattttagatcgtattgatagcctgacggctgcggtaccggtctttgcttgcttgttgttactggtattcaggacgctttaacggaaggtaatatgctgagttttctctgggatttggcttcgttcatcgttgcactgggtgtacttatcaccgtgcatgaatttggtcatttctgggttgcccggcgttgtggtgttcgcgttgagcgtttctcaatagggtttggtaaggcgctctggcggcgaactgataagctcggcaccgaatatgttatcgccctgatcccgttgggcggttatgtcaaaatgctggatgagcgcgcagaaccggtcgttccggaactccgccaccatgccttcaataataaatctgtcggccaacgagcggcgattatcgccgcaggtccggttgcaaacttcatttttgctatctttgcctactggctggtttttattattggtgtgcctggcgtacgtccggtggttggcgaaatagcagccaattcgatagctgcggaagcacaaattgcaccaggtacggaactaaaagccgtagatggtatcgaaacgcctgattgggatgccgtgcgtttgcagttggtcgataaaattggcgatgaaagcaccaccattacagtagcgccatttggcagcgaccaacggcgggatgtaaagctcgatttacgtcactgggcgtttgagcctgataaagaagatccggtatcttcgctggggattcgtcctcgtgggccgcaaattgaacctgtactggaaaatgtgcagccaaactcggcggcaagcaaggcaggtttgcaagcaggcgacaggatcgttaaagtcgatggtcagcccttaacgcagtgggtgacctttgtgatgcttgtccgggataacccgggtaaatccttagcgttagaaatcgaaaggcaggggagtcccttgtctttgacattaatcccggagagtaaaccgggtaatggtaaagcgattggttttgtcggtattgagccgaaagtcattcctttgccagatgagtataaagttgtacgccagtatgggccgttcaacgccatcgtcgaagccacggacaaaacgtggcagctgatgaagctgacggtcagtatgctgggaaaattgatcaccggtgatgtgaaactgaacaacctcagtgggccgatctctatcgccaagggggctgggatgacagcggaactcggggttgtttattacctgccgtttcttgcgcttattagcgtgaacttagggataattaacctgtttccgttgcccgtacttgacggggggcatctgctgttccttgcgatcgaaaagatcaagggcggaccggtatccgagcgggttcaagacttttgttatcgcattggctcgattctgctggtgctgttaatggggcttgcacttttcaatgatttctctcggttatgagagttagttaggaagaacgcataataacgatggcgatgaaaaagttgctcatagcgtcgctgctgtttagcagcgccaccgtatacggtgctgaagggttcgtagtgaaagatattcatttcgaaggccttcagcgtgtcgccgttggtgcggccctcctcagtatgccggtgcgcacaggcgacacggttaatgatgaagatatcagtaataccattcgcgctctgtttgctaccggcaactttgaggatgttcgcgtccttcgtgatggtgatacccttctggttcaggtaaaagaacgtccgaccattgccagcattactttctccggtaacaaatcggtgaaagatgacatgctgaagcaaaacctcgaggcttctggtgtgcgtgtgggcgaatccctcgatcgcaccaccattgccgatatcgagaaaggtctggaagacttctactacagcgtcggtaaatatagcgccagcgtaaaagctgtcgtgaccccgctgccgcgcaaccgtgttgacctaaaactggtgttccaggaaggtgtgtcagctgaaatccagcaaattaacattgttggtaaccatgctttcaccaccgacgaactgatctctcatttccaactgcgtgacgaagtgccgtggtggaacgtggtaggcgatcgtaaataccagaaacagaaactggcgggcgaccttgaaaccctgcgcagctactatctggatcgcggttatgcccgtttcaacatcgactctacccaggtcagtctgacgccagataaaaaaggtatttacgtcacggtgaacatcaccgaaggcgatcagtacaagctttctggcgttgaagtgagcggcaaccttgccgggcactccgctgaaattgagcagctgactaagatcgagccgggtgagctgtataacggcaccaaagtgaccaagatggaagatgacatcaaaaagcttctcggtcgctatggttatgcctatccgcgcgtacagtcgatgcccgaaattaacgatgccgacaaaaccgttaaattacgtgtgaacgttgatgcgggtaaccgtttctacgtgcgtaagatccgttttgaaggtaacgatacctcgaaagatgccgtcctgcgtcgcgaaatgcgtcagatggaaggtgcatggctggggagcgatctggtcgatcagggtaaggagcgtctgaatcgtctgggcttctttgaaactgtcgataccgatacccaacgtgttccgggtagcccggaccaggttgatgtcgtctacaaggtaaaagagcgcaacaccggtagcttcaactttggtattggttacggtactgaaagtggcgtgagcttccaggctggtgtgcagcaggataactggttaggtacaggttatgctgttggtatcaacgggaccaaaaacgattaccagacctatgctgaactgtcggtaaccaacccgtacttcaccgtagatggcgtaagcctcggtggtcgtctcttctataatgacttccaggcagatgacgccgacctgtccgactataccaacaagagttatggtacagacgtgacgttgggcttcccgattaacgaatataactcgctgcgtgcaggtctgggttatgtacataactccctgtccaacatgcagcctcaggttgcgatgtggcgttatctgtactctatgggtgaacatccgagcacctctgatcaggataacagcttcaaaacggacgacttcacgttcaactatggttggacctataacaagcttgaccgtggttacttcccgacagatggttcacgtgtcaacctgaccggtaaagtgaccattcctggatcggataacgaatactacaaagtgacgttagacacggcgacttatgtgccgatcgatgacgatcacaaatgggttgttctggggcgtacccgctggggttatggtgatggtttaggcggcaaagagatgccgttctacgagaacttctatgccggtggttccagcaccgtgcgtggcttccagtccaataccattggtccgaaagcagtttacttcccgcatcaggccagtaattatgatccggactatgattacgaatgtgcgactcaggacggcgcgaaagacctgtgtaaatcggatgatgctgtaggcggtaacgccatggcggttgccagcctcgagttcatcaccccgacgccgtttattagcgataagtatgctaactcggttcgtacttccttcttctgggatatgggtaccgtttgggatacaaactgggattccagccaatattctggatatccggactatagtgatccaagcaatatccgtatgtctgcgggtatcgcattacaatggatgtccccattggggccgttggtgttctcctacgcccagccgttcaaaaagtacgatggagacaaggcagaacagttccagtttaacatcggtaaaacctggtaagtgttctccacaaaggaatgtagtggtagtgtagcgatgactttaggcgatcaatataagatcgccgggccacgcaaagaactgcaccctccggtgcaaatgggatggtaaggagtttattgtgaaaaagtggttattagctgcaggtctcggtttagcactggcaacttctgctcaggcggctgacaaaattgcaatcgtcaacatgggcagcctgttccagcaggtagcgcagaaaaccggtgtttctaacacgctggaaaatgagttcaaaggccgtgccagcgaactgcagcgtatggaaaccgatctgcaggctaaaatgaaaaagctgcagtccatgaaagcgggcagcgatcgcactaagctggaaaaagacgtgatggctcagcgccagacttttgctcagaaagcgcaggcttttgagcaggatcgcgcacgtcgttccaacgaagaacgcggcaaactggttactcgtatccagactgctgtgaaatccgttgccaacagccaggatatcgatctggttgttgatgcaaacgccgttgcttacaacagcagcgatgtaaaagacatcactgccgacgtactgaaacaggttaaataagtaatgccttcaattcgactggctgatttagcgcagcagttggatgcagaactacacggtgatggcgatatcgtcatcaccggcgttgcgtccatgcaatctgcacaaacaggtcacattacgttcatggttaacccaaaataccgtgagcatttaggcttgtgccaggcgtccgcggttgtcatgacccaggacgatcttcctttcgcgaaaagtgccgcactggtagtgaagaatccctacctgacttacgcgcgcatggcgcaaattttagataccacgccgcagcccgcgcagaacattgcacccagtgcggtgatcgacgcgacggcgaagctgggtaacaacgtatcgattggcgctaacgcggtgattgagtccggcgttgaactgggcgataacgtgattatcggtgccggttgcttcgtaggtaaaaacagcaaaatcggtgcaggttcgcgtctctgggcgaacgtaaccatttaccatgagatccagatcggtcagaattgcctgatccagtccggaacagtggtaggcgcagacggctttggttatgccaacgatcgtggtaactgggtgaagatcccacagattggtcgcgtaattattggcgatcgcgtggagatcggtgcctgcacaaccatcgatcgcggcgcgctggatgacactattattggcaatggcgtgatcattgataaccagtgccagattgcacataacgtcgtgattggcgacaatacggcggttgccggtggcgtcattatggcgggcagcctgaaaattggtcgttactgcatgatcggcggagccagcgtaatcaacgggcatatggaaatatgcgacaaagtgacggttacgggcatgggtatggtgatgcgtcccatcactgaaccaggcgtctattcctcaggcattccgctgcaacccaacaaagtctggcgcaaaaccgctgcactggtgatgaacattgatgacatgagcaagcgtctgaaatcgcttgagcgcaaggttaatcaacaagactaacgttccatcttttgttcgccaaactttacggcctgtctcattcttacgattgcggcaggccgtgttattattgtcgtttcttatattttgacaggaagagtatcttgactactaacactcatactctgcagattgaagagattttagaacttctgccgcaccgtttcccgttcttactggtggatcgcgtgctggattttgaagaaggtcgttttctgcgcgcagtaaaaaatgtctctgtcaatgagccattcttccagggccatttccctggaaaaccgattttcccgggtgtgctgattctggaagcaatggcacaggcaacaggtattctggcgtttaaaagcgtaggaaaactggaaccgggtgagctgtactacttcgctggtattgacgaagcgcgcttcaagcgcccggtcgtgcctggcgatcaaatgatcatggaagtcactttcgaaaaaacgcgccgcggcctgacccgttttaaaggggttgctctggtcgatggtaaagtagtttgcgaagcaacgatgatgtgtgctcgtagccgggaggcctgatacgtgattgataaatccgcctttgtgcatccaaccgccattgtggaagagggcgcgtcaattggcgcgaacgcacacattggtcctttttgtatcgttggaccccatgtcgaaattggtgagggtaccgtactgaaatctcacgttgtcgtgaatggtcatactaaaattggccgcgataatgagatttatcagttcgcctccatcggcgaagttaaccaggatctgaaatatgctggcgaaccgacccgtgtggaaatcggcgatcgtaaccgcattcgcgaaagcgtcaccattcatcgtggcacagtccagggcggtggattgacgaaggtgggcagcgacaacttactgatgatcaacgcgcacattgcgcacgattgtacggtaggtaaccgctgtattctcgccaacaacgcaacgctggcgggtcacgtatcggttgacgacttcgcgatcatcggcggcatgaccgcagtccatcagttctgcatcattggtgcgcacgtgatggttggcggctgctccggtgtggcgcaggacgtccctccttatgtcattgcgcagggtaaccacgcaacgccgttcggtgtcaatatcgaagggctgaagcgccgcggattcagccgtgaggcgattaccgctatccgcaatgcgtataagctgatttatcgtagcggtaaaacgctcgatgaagtgaaaccggaaattgctgaactggcggaaacatatccggaagtgaaagcctttaccgatttctttgcacgctcaacgcgcggtctgattcgttaatgactgaacagcgtccattaacgattgccctggtcgccggagaaacctccggcgatatcctgggggccggtttaatccgcgctctgaaagaacatgtgcccaacgcccgctttgttggtgttgccgggccacgaatgcaggctgaaggctgcgaagcctggtacgaaatggaagaactggcggtgatgggcattgttgaagtgctcggtcgtctgcgtcgcttactgcatattcgtgccgatctgacaaagcgttttggcgaactgaagccagatgtttttgttggtattgatgcgcctgacttcaatattactcttgaaggtaacctcaaaaagcagggtatcaaaaccattcattacgtcagtccgtcagtctgggcgtggcgacagaaacgtgttttcaaaataggcagagccaccgatctggtgctcgcatttctgcctttcgaaaaagcgttttatgacaaatacaacgtaccgtgccgctttatcggtcataccatggctgatgccatgccattagatccagataaaaatgccgcccgtgatgtgctggggatccctcacgatgcccactgcctggcgttgctaccggggagccgtggtgcagaagttgaaatgcttagtgccgatttcctgaaaacggcccagcttttgcgccagacatatccggatctcgaaatcgtggtgccactggtgaatgccaaacgccgcgagcagtttgaacgcatcaaagctgaagtcgcgccagacctttcagttcatttgctggatgggatgggccgtgaggcgatggtcgccagcgatgcggcgctactggcgtcgggtacggcagccctggagtgtatgctggcgaaatgcccgatggtggtgggatatcgcatgaagccttttaccttctggttggcgaagcggctggtgaaaactgattatgtctcgctgccaaatctgctggcgggcagagagttagtcaaagaattattgcaggaagagtgtgagccgcaaaaactggctgcggcgctgttaccgctgttggcgaacgggaaaaccagccacgcgatgcacgataccttccgtgaactgcatcagcagatccgctgcaatgccgatgagcaggcggcacaagccgttctggagttagcacaatgatcgaatttgtttatccgcacacgcagctggttgcgggtgtggatgaagtcggactcgggccgttagttggcgcggtcgtcaccgctgcggtgatccttgacccggcgcgcccgattgccgggctgaatgattccaaaaagctgagcgaaaaacgccgtctggcgctctatgaagagatcaaagagaaagcgttgagctggagtctgggccgcgcggaaccccacgaaatcgacgagctgaacattcttcatgcgaccatgctggcgatgcagcgtgccgtcgctgggctgcatattgcgccggaatatgtgttgattgatggtaaccgctgcccgaaattaccgatgcctgcgatggctgtggtgaaaggcgatagccgcgtaccggaaatcagtgccgcgtctatcctggcgaaagtgacgcgtgacgccgaaatggcggcgctggatattgttttcccgcaatatggttttgcccaacacaaagggtacccaaccgcttttcatctggaaaaactggctgaacacggcgcgaccgaacaccatcggcgcagctttgggcctgtcaaacgcgcactgggacttgcgtcctgattcttgtgtcgagattaagtaaaccggaatctgaagatgtctgaaccacgtttcgtacacctgcgggtgcacagcgactactcgatgatcgatggcctggccaaaaccgcaccgttggtaaaaaaggcggcggcgttgggtatgccagcactggcgatcaccgatttcaccaacctttgtggtctggtgaagttctacggagcgggacatggcgcagggattaagcctatcgtcggggcagattttaacgtccagtgcgacctgctgggtgatgagttaacccacctgacggtactggcggcgaacaataccggctatcagaatctgacgttgctgatctcaaaagcgtatcagcgcgggtacggtgccgccgggccgatcatcgatcgcgactggcttatcgaattaaacgaagggttgatccttctttccggcggacgcatgggcgacgtcggacgcagtcttttgcgtggtaacagcgcgctggtagatgagtgtgtcgcgttttatgaagaacacttcccggatcgctattttctcgagctgatccgcaccggcaggccggatgaagaaagctatctgcacgcggcggtggaactggcggaagcgcgcggtttgcccgtcgtggcgaccaacgacgtgcgctttatcgacagcagcgactttgacgcacacgaaatccgcgtcgcgatccacgacggctttaccctcgacgatcctaaacgcccgcgtaactattcgccgcagcaatatatgcgtagcgaagaggagatgtgtgagctgtttgccgacatccccgaagcccttgccaacaccgttgagatcgccaaacgctgtaacgtaaccgtgcgtcttggtgaatacttcctgccgcagttcccgaccggggacatgagcaccgaagattatctggtcaagcgtgcaaaagagggcctggaagagcgtctggcctttttattccctgatgaggaagaacgtcttaagcgccgcccggaatatgacgaacgtctggagactgaacttcaggttatcaaccagatgggcttcccgggctacttcctcatcgttatggaatttatccagtggtcgaaagataacggcgtaccggtagggccaggccgtggctccggtgcgggttcactggtggcctacgcgctgaaaatcaccgacctcgatccgctggaatttgacctgctgttcgaacgtttccttaacccggaacgtgtctccatgcctgacttcgacgttgacttctgtatggagaaacgcgatcaggttatcgagcacgtagcggacatgtacggtcgtgatgcggtatcgcagatcatcaccttcggtacaatggcggcgaaagcggtgatccgcgacgtaggccgcgtgctggggcatccgtacggctttgtcgatcgtatctcgaaactgatcccgcccgatccggggatgacgctggcgaaagcgtttgaagccgagccgcagctgccggaaatctacgaagcggatgaagaagttaaggcgctgatcgacatggcgcgcaaactggaaggggtcacccgtaacgccggtaagcacgccggtggggtggttatcgcgccgaccaaaattaccgattttgcgccgctttactgcgatgaagagggcaaacatccggtcacccagtttgataaaagcgacgttgaatacgccggactggtgaagttcgacttccttggtttgcgtacgctcaccatcatcaactgggcgctggagatgatcaacaagcggcgggcgaagaatggcgagccgccgctggatatcgctgcgatcccgctggatgataagaaaagcttcgacatgctgcaacgctcggaaaccacggcggtattccagcttgaatcgcgcggcatgaaggacctgatcaagcgtctacaacctgactgcttcgaagatatgatcgccctagtggcactgttccgccccggtccgttgcaatcagggatggtggataactttatcgaccgtaaacatggtcgtgaagagatctcctatccggacgtacagtggcagcatgaaagcctgaaaccggtactggagccaacctacggcattatcctgtatcaggaacaggtcatgcagattgcgcaggtgctttctggttataccctcggtggcgcggatatgctgcgtcgtgcgatgggtaagaaaaagccggaagagatggctaagcaacgttctgtatttgctgaaggtgcagaaaagaacggaatcaacgctgaactggcgatgaaaatcttcgacctggtggagaaattcgctggttacggatttaacaaatcgcactctgcggcctatgctttggtgtcatatcaaacgttatggctgaaagcgcactatcctgcggagtttatggcggcggtaatgaccgccgatatggacaacaccgagaaggtggtgggtctggtggatgagtgctggcggatggggctgaaaatcctgccaccagatataaactccggtctttaccatttccacgtcaacgacgacggcgaaatcgtgtatggtattggcgcgatcaaaggggtcggtgaaggtccgattgaggccatcatcgaagcccgtaataaaggcggctacttccgcgaactgtttgatctctgcgcccgtaccgacaccaaaaagttgaaccgtcgcgtgctggaaaaactgatcatgtccggggcgtttgaccgtcttgggccacatcgcgcagcgctgatgaactcgctgggcgatgcgttaaaagcggcagatcaacacgcgaaagcggaagctatcggtcaggccgatatgttcggcgtgctggccgaagagccggaacaaattgaacaatcctacgccagctgccaaccgtggccggagcaggtggtattagatggggaacgtgaaacgttaggcctgtacctgaccggacaccctatcaaccagtatttaaaagagattgagcgttatgtcggaggcgtaaggctgaaagacatgcacccgacagaacgtggtaaagtcatcacggctgcggggctcgttgttgccgcgcgggttatggtcaccaagcgcggcaatcgtatcggtatctgcacgctggatgaccgttccgggcggctggaagtgatgttgtttactgacgccctggataaataccagcaattgctggaaaaagaccgcatacttatcgtcagcggacaggtcagctttgatgacttcagcggtgggcttaaaatgaccgctcgcgaagtgatggatattgacgaagcccgggaaaaatatgctcgcgggcttgctatctcgctgacggacaggcaaattgatgaccagcttttaaaccgactccgtcagtctctggaaccccaccgctctgggacaattccagtacatctctactatcagagggcggatgcacgcgcgcggttgcgttttggcgcgacgtggcgtgtctctccgagcgatcgtttattaaacgatctccgtggcctcattggttcggagcaggtggaactggagtttgactaatacaggaatactatgagtctgaatttccttgattttgaacagccgattgcagagctggaagcgaaaatcgattctctgactgcggttagccgtcaggatgagaaactggatattaacatcgatgaagaagtgcatcgtctgcgtgaaaaaagcgtagaactgacacgtaaaatcttcgccgatctcggtgcatggcagattgcgcaactggcacgccatccacagcgtccttataccctggattacgttcgcctggcatttgatgaatttgacgaactggctggcgaccgcgcgtatgcagacgataaagctatcgtcggtggtatcgcccgtctcgatggtcgtccggtgatgatcattggtcatcaaaaaggtcgtgaaaccaaagaaaaaattcgccgtaactttggtatgccagcgccagaaggttaccgcaaagcactgcgtctgatgcaaatggctgaacgctttaagatgcctatcatcacctttatcgacaccccgggggcttatcctggcgtgggcgcagaagagcgtggtcagtctgaagccattgcacgcaacctgcgtgaaatgtctcgcctcggcgtaccggtagtttgtacggttatcggtgaaggtggttctggcggtgcgctggcgattggcgtgggcgataaagtgaatatgctgcaatacagcacctattccgttatctcgccggaaggttgtgcgtccattctgtggaagagcgccgacaaagcgccgctggcggctgaagcgatgggtatcattgctccgcgtctgaaagaactgaaactgatcgactccatcatcccggaaccactgggtggtgctcaccgtaacccggaagcgatggcggcatcgttgaaagcgcaactgctggcggatctggccgatctcgacgtgttaagcactgaagatttaaaaaatcgtcgttatcagcgcctgatgagctacggttacgcgtaattcgcaaaagttctgaaaaagggtcacttcggtggcccttttttatcgccacggtttgagcaggctatgattaaggaaggattttccaggaggaacacatgaacatcattgccattatgggaccgcatggcgtcttttataaagatgagcccatcaaagaactggagtcggcgctggtggcgcaaggctttcagattatctggccacaaaacagcgttgatttgctgaaatttatcgaacataaccctcgaatttgcggcgtgatttttgactgggatgagtacagtctcgatttatgtagcgatatcaatcagcttaatgaatatctcccgctttatgccttcatcaacacccactcgacgatggatgtcagcgtgcaggatatgcggatggcgctctggttttttgaatatgcgctggggcaggcggaagatatcgccattcgtatgcgtcagtacaccgacgaatatcttgataacattacaccgccgttcacgaaagccttgtttacctacgtcaaagagcggaagtacaccttttgtacgccggggcatatgggcggcaccgcatatcaaaaaagcccggttggctgtctgttttatgattttttcggcgggaatactcttaaggctgatgtctctatttcggtcaccgagcttggttcgttgctcgaccacaccgggccacacctggaagcggaagagtacatcgcgcggacttttggcgcggaacagagttatatcgttaccaacggaacatcgacgtcgaacaaaattgtgggtatgtacgccgcgccatccggcagtacgctgttgatcgaccgcaattgtcataaatcgctggcgcatctgttgatgatgaacgatgtagtgccagtctggctgaaaccgacgcgtaatgcgttggggattcttggtgggatcccgcgccgtgaatttactcgcgacagcatcgaagagaaagtcgctgctaccacgcaagcacaatggccggttcatgcggtgatcaccaactccacctatgatggcttgctctacaacaccgactggatcaaacagacgctggatgtcccgtcgattcacttcgattctgcctgggtgccgtacacccattttcatccgatctaccagggtaaaagtggtatgagcggcgagcgtgttgcgggaaaagtgatcttcgaaacgcaatcgacccacaaaatgctggcggcgttatcgcaggcttcgctgatccacattaaaggcgagtatgacgaagaggcctttaacgaagcctttatgatgcataccaccacctcgcccagttatcccattgttgcttcggttgagacggcggcggcgatgctgcgtggtaatccgggcaaacggctgattaaccgttcagtagaacgagctctgcattttcgcaaagaggtccagcggctgcgggaagagtctgacggttggtttttcgatatctggcaaccgccgcaggtggatgaagccgaatgctggcccgttgcgcctggcgaacagtggcacggctttaacgatgcggatgccgatcatatgtttctcgatccggttaaagtcactattttgacaccggggatggacgagcagggcaatatgagcgaggaggggatcccggcggcgctggtagcaaaattcctcgacgaacgtgggatcgtagtagagaaaaccggcccttataacctgctgtttctctttagtattggcatcgataaaaccaaagcaatgggattattgcgtgggttgacggaattcaaacgctcttacgatctcaacctgcggatcaaaaatatgctacccgatctctatgcagaagatcccgatttctaccgcaatatgcgtattcaggatctggcacaagggatccataagctgattcgtaaacacgatcttcccggtttgatgttgcgggcattcgatactttgccggagatgatcatgacgccacatcaggcatggcaacgacaaattaaaggcgaagtagaaaccattgcgctggaacaactggtcggtagagtatcggcaaatatgatcctgccttatccaccgggcgtaccgctgttgatgcctggagaaatgctgaccaaagagagccgcacagtactcgattttctactgatgctttgttccgtcgggcaacattaccccggttttgaaacggatattcacggcgcgaaacaggacgaagacggcgtttaccgcgtacgagtcctaaaaatggcgggataacttgccagagcggcttccgggcgagtaacgtgctgttaacaaataaaggagacgttatgctgggtttaaaacaggttcaccatattgcgattattgcgacggattatgcggtgagcacagctttctactgcgatattcttggtttcacgctgcaaagcgaagtctatcgcgaagcgcgcgactcatggaaaggggatttggcgcttaatgggcaatatgtgattgagcttttctcatttccgttcccgccggaacgacccagccgaccggaagcttgcggtctgcgtcatctggcttttagcgttgatgacatcgatgcggcagtggcgcaccttgaaagccataacgtgaagtgtgaaaccatccgtgtcgatccatacacgcaaaaacgcttcaccttctttaacgatccggacgggctgccgttggaactgtatgagcagtaaggcttgtcatcgccgcatttgcccggtaacgtgccgggcattgctactgtaaaatcgcaccatcatgacactcacgctcaatagacaacttctcacctcacgccagattctggtggcctttagcggcgggcttgactccaccgttctgctgcatcagttggtgcagtggcggacggaaaatccgggtgtcgctctgcgcgctattcatgtgcatcacggtttaagtgccaatgccgatgcctgggttacgcattgcgaaaacgtctgccaacagtggcaggtgccgctggtggtcgaacgcgtacaacttgcgcaagaaggactgggcattgaggcccaggcgcggcaggcacgttatcaggcatttgcccgcaccttgttgcccggtgaagtgctggtcaccgcgcaacatctcgacgatcaatgtgaaacctttctgctggcgctaaaacgcggcagtggccctgccgggctttcggctatggcggaagtctcggagtttgccggaacgcggcttattcgcccgttgctcgcccgcacgcggggggaactggtgcagtgggcgcgtcagtatgatttacgctggattgaagacgaaagtaatcaggacgactcatacgatcgtaactttctgcgcctgcgcgtagtgccgttattgcagcagcgttggccgcattttgccgaagcaacggcccgcagcgccgcactttgtgctgaacaagagagcctgctggatgaactgctggcagatgatttagcacactgtcaatcgccgcaggggacgctgcagattgtgccaatgctggcgatgagtgatgcccgccgcgcggcgattatccgccgctggctggcagggcagaatgcaccgatgccttcccgcgacgcgttggtgaggatctggcaggaagtggcgctggcgcgggaagatgcctcaccctgtttacgtttgggcgcgtttgaaatccgacgctatcagtcgcaactgtggtggattaaatccgtcaccgggcaaagcgaaaacattgtgccgtggcagacgtggcttcaaccgctggaattaccggcggggctgggaagtgtacagcttaatgcgggaggcgatattcgccctccgcgtgcagacgaagcggtcagcgtgcgtttcaaagcgccaggattgctgcatattgtcgggcgtaacggcggacgtaagctaaagaaaatctggcaagagctgggcgtgccgccgtggctacgtgacaccacgccactgctgttttatggcgaaacgctgattgcggcggcaggggtatttgtgacgcaagaaggtgtggctgaaggtgagaatggcgtaagttttgtctggcagaaaacgcttagttaagtgaaagccggataagacgcatcaaacgtcgcatccggcgaaagtcaatcaggattcgcttaccaccaccgtaccgatttccgggtggctaaagctggtaattttatccagacgcagctcgcgggtttcgccagcggcctcgacgaccaggtactccacatttttgcgggagactaaatcactggcttttgcctgcaatttttcgccatctttcagctcaagtgtcagcattaaatgatgctggcaggcgagctcaagattatcgtaatcatcacaattgattggttgatacgtatcattcattgacataatcgctcaccagtaagtttgccgcagcgtatgctgctttttccctgacagcctcagaaagggcgtcgtcggcagccatttcattcagcactttcaaaacgcagcccagcgcgtccggaacgtatcctaagtctccgctggcgatttccgcgtaccgcttgcgtattaactcacaatatttttccacatgccctcctgtcagcactctgacttaaccgtggatgcaagtctaagcctacgaagataaactctgtttcgcaaggtgactataccacactcatttctgcaatatcagcgccgcaactgcacgtattccgttacaatggcctcctgattcgaaaggagttttcttatggcgcttaaagcgacaatttataaagcgacggttaatgtggccgatctcgaccgcaaccagtttctcgatgcctctctgacgctggcgcgccatccttcagaaacccaggagcgtatgatgctgcgcttgctggcgtggctgaaatatgctgatgaacgtctgcaatttacccgtggtttgtgtgccgatgatgagccggaagcgtggctgcgtaacgatcacctgggcattgatttgtggattgagctggggctgccggatgagcggcggattaagaaagcctgcacccaggccgcagaagtggcgctgtttacctataatagtcgggcggcgcaaatctggtggcagcaaaatcagagcaaatgtgtgcagtttgccaatctttccgtctggtatctggacgatgaacaactggcgaaagtaagcgcctttgccgatcgtaccatgacgctgcaggcaacgattcaggatggcgtgatctggttatcggatgataagaataatctggaagtgaacttaaccgcctggcaacaaccttcatgattgtgatttcccgacatgttgctattcccgatggtgagcttgagatcaccgccattcgtgcgcagggcgcgggcgggcagcatgttaataagacctcaacggctattcatctgcgttttgacattcgggcgtccagcctgccagagtattacaaagagcgtctgctcgccgccagccatcatttgatcagcagtgatggcgtgattgtcattaaggcacaggaataccgcagtcaggaactgaaccgcgaagcagctctggcccggctggtggctatgattaaagaattaacaacagaaaaaaaagcccgacgacccacgcggcccacccgtgcatcgaaagagcgcaggctggcatcgaaagcacaaaaatcaagcgtgaaggcgatgcgcggcaaagtgcgcagcggtcgggaataaaaagaaggaatggatggtgaaaaaagcgatagtgacagcgatggctgtaatcagcctctttactctgatgggatgtaataatcgggccgaagtcgatacgctttctccggcgcaggctgccgaactgaaaccgatgccgcaaagttggcgcggcgtgctgccgtgtgccgattgcgaaggaatcgaaacctctctgttcctcgaaaaagacggaacatgggtgatgaatgagcgttatctcggtgctcgtgaagaaccttcctccttcgcttcctacggtacatgggcgcgaaccgctgacaagctggtattaaccgacagcaaaggtgaaaagtcatattatcgggcgaaaggcgatgcgctggagatgctcgatcgtgaaggcaatccgattgaatcgcagttcaactatacgctggaagcggcacaatccagtttacctatgacgccgatgaccctgcggggcatgtatttttatatggctgatgcggcgaccttcactgattgcgcgaccggaaaacgtttcatggtagcgaataacgcagagctggagcgtagctacctggctgcgcgcggtcacagtgaaaaaccggtgttactgtcagtagaaggtcactttacgcttgagggtaatccggataccggtgcgccgactaaagtattggcacccgatacggcagggaaattttaccccaaccaggattgcagtagtttggggcagtaacccgtcttgagacagaaacaaacgcaaaacaggccagaaggatatatttcaacattttgaatttgcacgttttttgtaggccggataaggcgtttacgccgcatccggcaatggtgctcaacgcctgatgcgacgctggcgcgtcttatcatgcctacaacccccctcataccttaaggcggataaggcatttactttatcaccgggtcaaaccaacaaagcgacccgccttgatataaatcccaggcttcaggtgcccaacatactgtaactgcgtttctggcttaaacgcagagacatcaccaatacgcatatgtatcagatcggcagggctaatccagcccgattgcgccagtgtaagtggatgcccggctttggcaaaggcatccgtgacaaattccgaacaaaaccccgactttttgtctccttcgcccacactgcttaactgcgctttcgccaggccgctgacgcactgttggcgaaaatcctcggagaacggattcagtgagcacatctggcgagtcaccataaagggaataaattcgacaatgccgcgatagttataaccgctatctttgattttattggcaaacgcggtgatatctgtggcttgttgcggggtaagatccgggactcgtaagacgaaaagcttatcactatgcttcatcgcttttttaagggaaacgatctggacgccagcgcctgtcgcttctgcaacgttattatcacccagaaagattgcaacgtgactcacagaggaagtgctgaagacgcggattccaaatgaggttaccccaaggcttgaggagaacagcaaatcgccgggtttgagatcaggtgccgttatttcttttattgattgttcggtgaaagagctttgatgctggaatttgacagcccatgtttttgcctcggcatctactgctgtggctgatgggtctggctggctgatatcaacggtacaagccgaaagtaaaagaaagctggggagaaacaggcggcagtacgcctttggtttatccattttatacaatccatgtaaaaaaagggccctgaaattcaggaccctttctggcatcagcctttaatctgtttcaccagatattcgacgatgtcaccagtcttaattaactgtttctcgccgttgcgacgatatttatattcgatatcgtcgttgtcgaggttacggtcgcccagcacaatagtgtgcggaataccgatcagttccatatcagcaaacatcacgcccggacgctctttgcggtcatccagcagcacttcgataccttgtgcacgcagttcgctgtacagtttctcagcaagctcttgtacgcggaaggatttgtgcatgttcatcggcagaatcgccacctggaacggcgcgatagcgtcaggccatacgatgcctcgttcgtcgtagttctgctcaatcgccgcagctaccacacgcgttaccccgataccgtagcaacccatcgtcaggatttggttacggccatcttcaccctgtacggaggctttcagtgcttcggagtacttggtacccagctggaagatgtgaccaacttcgataccacgtttgatcagcagcgtaccctggccatccgggcttggatcgccagccaccacgttacggatatctgcaacttccggggtagcgacatcgcgatcccagttgatgccgaagtagtgtttaccatcgatgttagcaccagcagcgaaatcactcatcgccgcaacggtacggtcaatcaccaccggaatcggcatgtttaccggacccagtgaacccggaccggctttaaccacggcacgaatttcttcttcggtcgcgaaagtcagcgggcttgcaacctgcggcagtttttctgctttaacttcgttcagctcgtgatcaccgcgcaccagcagcgcaaccagcgggaagctgctgccttcaaccgctttaaccagcagagtcttaaccgttttctcaatcggcagattgaactgttcaaccagttccgcgatggttttcgcgttcggcgtatcaaccagcgtcatttcctgggtagcagcagcgcgcggttctttcggcgcgatagcttctgccagttcaatgttcgctgcatagtcagaggtgtcggagaagaccacatcgtcttcaccgctctgcgccagcacctggaattcgtgagaggcgctgccgccgatagaaccggtgtcggcttgtacggcgcggaaatccagccccatgcggctgaagattttgctgtaggccgcatacattgcatcgtaggtttcctgcagggattcctgagaagtatggaaagagtaagcatctttcatcaggaattcgcgggaacgcatgacgccgaaacgcggacgcacttcgtcgcggaacttggtctggatctgatagaagttcagcggcagctgtttgtaagagctaagctcgttacgaatcaggtcagtgataacttcttcatgagttgggccgagtacgaacggacgctcgccacggtcaacaaaacgcagcagttccggaccgtactgttcccaacgaccactctcttgccacaaatcggctggctgaaccaccggcatcgacacctcgatcgcaccggcgttgttcatctcttcacgcacgatgttttcgacttttttcagaacgcgcacgccggtcggcagccaggtatataacccggaggccagcttgcggatcatcccggcgcgcagcatcagctgatggctgatcacctcggcgtcggcaggtgtctccttgagagtggagagcaggtattggctagtacgcatgttgttacggttccagttggaaggtagaacaggctcaaggcgagcctgggacaaaaaaaagtgatttagtttaccagtgcaaaagaaatgtcaaaagagaagggcgtgaatttaacgcggttccagcgcaaagacttcaaaacctgcgtcggtgacgcgccagcgaacgttaaaatcatgtagccagacggcataggttttgcccgtttcctcacctttacgataggccgggcgcgggtcctgcgccagtacttcgcggataaacagcgttaactgcggataacgcttctccagcgtcaaaagctgcttttcgacctctgcggtaaaactcaccgccatctctgcagctggcgcactttgcgcatagctggcactggcatcgggaagcgattcggcaaaggggagatacggtttgatatccactaccggcgtaccatcgaccagatccagactgccgagcttcagaatcacgctgtctttatggcaaacaacctctttcagctctaccagcgacatgccaattgggttagggcggaaagtagagcgtgttgcgaaaacccccattctggcgttaccgccgaggcgcggtggacgcacagtcggacgccagccgccttccatcgtttgatgaaagacgaaaaggatccataaatggctgaacgcttccaggccgcgaacggcgtcggcctggttgtagggagcaatgagatgcagttcgccgttggcgctttttaccagacctggctggcgcggaacggcgaacttttctttatagggcgagcgaataacgcctatttgctcgaactggaaactgctcatttcgccgtaatgttaagcgcagaaccgatacatacagcctgacgatagcagcctggcgtaccgctggtgacttcgcagctatgcagtaatacagcattggctttcattttagaggcgttgatttgcatccgcttacgtgcggttggaatgctcggcggagagtcctgattagaggcctggcaagagtcgccactgacttcaccgagatcgcggaacggtttgccgactaattcttctgcattggtataaattcggaccggcgtggcgcgcggcgctttcggttttgcaggctccgctttcggctggggtgcagtgctttgaacgggttcgacaggggatctgcttaacatggaacagccgcttagcatgagtgctactaaacagatcggtaaagcacgcatagtatttcctcaatgtatgatcaaaacgtcaatattgaatcaggagcttgtaaaaatgacaagacgggcaagcgcccgtcctgaatgatattacaaattgtggaaacagcctaaaaattaccagcctttaacagctccgccgttaaacactttgtttgctgcttcgtaaacttcgtcagactgataagcctggacgaatttcttcacgttctcggcgtctttgttatcttcacgcgtcacgatcaggtttacgtacggggactctttatcttcaacaaagataccgtctttcgccggagtcaggccaatctggctggcataggtggtattgataactgccagagcgatttgcgcgtcgtccagagaacgcggcagttgcggtgcttccagttcaacaattttcagatttttggggttctcaacaacatcaagaacggtcggcagcaggccaacgccatctttcagtttgatcaagcccactttttgcagcagcagcagtgaacgaccaaggttagttgggtcgtttggcacggcaacctgcgaaccatcctgcagttcatccagtgatttgattttcttggagtaaccagcaatcggataaacaaaagtgttgcctactgcgaccagtttgtagccacgatctttcagttgctgatcaaggtacggtttatgctggaaggcgttggcgtcgatatcgcctttgctcaatgcttcgtttggcagaacatagtcgttgaaggttaccagctcaacgtccaggccatatttgtctttcgcaactttctgcgcgacttctgcaacctgctgttcggcaccaacaatcacgccgactttaatgtggtttggatctttttcatcctgaccgcagcctaccagtgccagtgatccgatcagggctcccactgccgcaaaggttttgaatttgaacgccataccttattccttcttcaattatttatgttgtgttgaacgttacttgcgagtgacagcccggacgatgcggtcgcctgcgaactgaattaaataaaccagaatgaccagcaataccagtaccgtattcatcaccgtcgcgttatagccgatgtagccatactgatagccaatctgacctaaaccaccggcaccgactgcaccacccatcgcggaataaccgaccagggtaatcagggtgatagttgccgcattcaccagacccggcagcgcttccggtaacagcaccttacggacgatctgcatcggcgtggcacccattgcgcgggaagcttcaattaacccggttgggatctccagcagagcgttctcgaccatacgggcaataaacggtgctgcaccaacggttaacggaacaatcgctgcctgcaaaccaatcgatgtaccgacaataacgcgggtaaacggaatcatccatacaagcaagataatgaacgggatggaacggaaaatgttcacaatcgcagaaacggtacgatacagcttcgcgttagcaataatttgccccggacgcgtgacataaagcagaacgccaaccggcagaccaatcacaaagccaaaaaaaccggatacgaaggtcattgccagcgtttcccatacgccacgaaccagcagccacatcatcggctcagacataacccagtacctctacttttacatggtgttcctgcagccaggcaatggcggcttgcgtatcttgttgtgtgccgtgcatttcagtcagcatgatgccgaacttaacgccaccggcgtaatccatctgcgcgctaataatgttgttgttgacgttgaaacgacgcgcggtttcagaaagcagtggggcatcgaccgattgaccggtaaactccagacgcagcatcggcacgcagtcagtaaatggctccgcttgcagacgttcctggtaatcttccgggatatccagatgcagggtcgactgaataaacttctgcgccagcggcgttttcggatgcgagaacacttcacttaccgtgtcctgctcgatcagttctccattgctgatgaccgccacgcaatcacaaatgcgcttcacaacgtccatttcgtgggtgatcaacagaatcgtcaaccccagacggcggttgatgtctttcagcagttcgagaatagaacgtgtcgttgccgggtccagcgcgctggtggcttcatcacacagcaatactttgggattgctggctaacgcacgggcaattgccacacgttgtttctgcccaccggaaagattcgacgggtagctatcatgcttatcgccaagaccaaccaatgacagcaattccgtcacgcgacgtttgacctcgtctttcggtgtgttgtccagctccagcggcagagccacgttgccaaaaacagtacgcgaagagagcaggttaaaatgctggaaaatcataccaatctggcggcgagctttggtcaactcggattctgacagcgtggtcagttcctggccatcgaccagcacgctaccctcggttgggcgctccagcaggtttacacaacgtataagcgtactcttacccgcgcctgaggcaccgataacgccataaatttgtccagctggcacatgcaggctgacgttgttcaacgcctggatggtgcgggtgccctggtggaacactttggtgatattcgaaagttttatcattgattatttattatcgtcattaagttagtcgtggcatctcgaatgcctgaaacgggcaacgccgtcaatgaaatggatgttaaggcatccagacgtctaaatcaatcaggtttatgcgaagagcactttcttgcaggtcgaaacatgcgatactagcgtcacatgccttattaaggagctataaaaggtggcgaagagcgtacccgcaatttttcttgaccgtgatggcaccattaatgtcgatcacggctatgtccatgagatcgacaactttgaatttatcgacggtgttattgacgccatgcgcgagctaaaaaaaatgggctttgcgctggtggtagtaaccaaccagtctggcattgctcgcggtaaatttaccgaagcacagtttgaaacgctgaccgagtggatggactggtcgctggcggaccgagatgtcgatctggatggtatctattattgcccgcatcatccgcagggtagtgttgaagagtttcgccaggtctgcgattgccgcaaaccacatccggggatgcttttgtcagcacgcgattatttgcatattgatatggccgcttcttatatggtgggcgataaattagaagatatgcaggcagcggttgcggcgaacgtgggaacaaaagtgctggtgcgtacgggtaaacctattacgcctgaagcagaaaacgcggcggattgggtgttaaatagcctggcagacctgccgcaagcgataaaaaagcagcaaaaaccggcacaatgattaaaagatgagcggttgaaataaaaatgcatttttccgcttgtcttcctgagccgactccctataatgcgcctccatcgacacggcggatgtgaatcacttcacacaaacagccggttcggttgaagagaaaaatcctgaaattcagggttgactctgaaagaggaaagcgtaatatacgccacctcgcgacagtgagctgaaagccgcgtcgcaactgctctttaacaatttatcagacaatctgtgtgggcactcgaagatacggattcttaacgtcgcaagacgaaaaatgaataccaagtctcaagagtgaacacgtaattcattacgaagtttaattctttgagcatcaaacttttaaattgaagagtttgatcatggctcagattgaacgctggcggcaggcctaacacatgcaagtcgaacggtaacaggaagaagcttgcttctttgctgacgagtggcggacgggtgagtaatgtctgggaaactgcctgatggagggggataactactggaaacggtagctaataccgcataacgtcgcaagaccaaagagggggaccttcgggcctcttgccatcggatgtgcccagatgggattagctagtaggtggggtaacggctcacctaggcgacgatccctagctggtctgagaggatgaccagccacactggaactgagacacggtccagactcctacgggaggcagcagtggggaatattgcacaatgggcgcaagcctgatgcagccatgccgcgtgtatgaagaaggccttcgggttgtaaagtactttcagcggggaggaagggagtaaagttaatacctttgctcattgacgttacccgcagaagaagcaccggctaactccgtgccagcagccgcggtaatacggagggtgcaagcgttaatcggaattactgggcgtaaagcgcacgcaggcggtttgttaagtcagatgtgaaatccccgggctcaacctgggaactgcatctgatactggcaagcttgagtctcgtagaggggggtagaattccaggtgtagcggtgaaatgcgtagagatctggaggaataccggtggcgaaggcggccccctggacgaagactgacgctcaggtgcgaaagcgtggggagcaaacaggattagataccctggtagtccacgccgtaaacgatgtcgacttggaggttgtgcccttgaggcgtggcttccggagctaacgcgttaagtcgaccgcctggggagtacggccgcaaggttaaaactcaaatgaattgacgggggcccgcacaagcggtggagcatgtggtttaattcgatgcaacgcgaagaaccttacctggtcttgacatccacggaagttttcagagatgagaatgtgccttcgggaaccgtgagacaggtgctgcatggctgtcgtcagctcgtgttgtgaaatgttgggttaagtcccgcaacgagcgcaacccttatcctttgttgccagcggtccggccgggaactcaaaggagactgccagtgataaactggaggaaggtggggatgacgtcaagtcatcatggcccttacgaccagggctacacacgtgctacaatggcgcatacaaagagaagcgacctcgcgagagcaagcggacctcataaagtgcgtcgtagtccggattggagtctgcaactcgactccatgaagtcggaatcgctagtaatcgtggatcagaatgccacggtgaatacgttcccgggccttgtacacaccgcccgtcacaccatgggagtgggttgcaaaagaagtaggtagcttaaccttcgggagggcgcttaccactttgtgattcatgactggggtgaagtcgtaacaaggtaaccgtaggggaacctgcggttggatcacctccttaccttaaagaagcgtactttgcagtgctcacacagattgtctgatgaaaatgagcagtaaaacctctacaggcttgtagctcaggtggttagagcgcacccctgataagggtgaggtcggtggttcaagtccactcaggcctaccaaatttgcacggcaaatttgaagaggttttaactacatgttatggggctatagctcagctgggagagcgcctgctttgcacgcaggaggtctgcggttcgatcccgcatagctccaccatctctgtagtggttaaataaaaaatacttcagagtgtacctgcaaaggttcactgcgaagttttgctctttaaaaatctggatcaagctgaaaattgaaacactgaacaatgaaagttgttcgtgagtctctcaaattttcgcaacacgatgatgaatcgtaagaaacatcttcgggttgtgaggttaagcgactaagcgtacacggtggatgccctggcagtcagaggcgatgaaggacgtgctaatctgcgataagcgtcggtaaggtgatatgaaccgttataaccggcgatttccgaatggggaaacccagtgtgtttcgacacactatcattaactgaatccataggttaatgaggcgaaccgggggaactgaaacatctaagtaccccgaggaaaagaaatcaaccgagattcccccagtagcggcgagcgaacggggagcagcccagagcctgaatcagtgtgtgtgttagtggaagcgtctggaaaggcgcgcgatacagggtgacagccccgtacacaaaaatgcacatgctgtgagctcgatgagtagggcgggacacgtggtatcctgtctgaatatggggggaccatcctccaaggctaaatactcctgactgaccgatagtgaaccagtaccgtgagggaaaggcgaaaagaaccccggcgaggggagtgaaaaagaacctgaaaccgtgtacgtacaagcagtgggagcacgcttaggcgtgtgactgcgtaccttttgtataatgggtcagcgacttatattctgtagcaaggttaaccgaataggggagccgaagggaaaccgagtcttaactgggcgttaagttgcagggtatagacccgaaacccggtgatctagccatgggcaggttgaaggttgggtaacactaactggaggaccgaaccgactaatgttgaaaaattagcggatgacttgtggctgggggtgaaaggccaatcaaaccgggagatagctggttctccccgaaagctatttaggtagcgcctcgtgaattcatctccgggggtagagcactgtttcggcaagggggtcatcccgacttaccaacccgatgcaaactgcgaataccggagaatgttatcacgggagacacacggcgggtgctaacgtccgtcgtgaagagggaaacaacccagaccgccagctaaggtcccaaagtcatggttaagtgggaaacgatgtgggaaggcccagacagccaggatgttggcttagaagcagccatcatttaaagaaagcgtaatagctcactggtcgagtcggcctgcgcggaagatgtaacggggctaaaccatgcaccgaagctgcggcagcgacactatgtgttgttgggtaggggagcgttctgtaagcctgtgaaggtgtgctgtgaggcatgctggaggtatcagaagtgcgaatgctgacataagtaacgataaagcgggtgaaaagcccgctcgccggaagaccaagggttcctgtccaacgttaatcggggcagggtgagtcgacccctaaggcgaggccgaaaggcgtagtcgatgggaaacaggttaatattcctgtacttggtgttactgcgaaggggggacggagaaggctatgttggccgggcgacggttgtcccggtttaagcgtgtaggctggttttccaggcaaatccggaaaatcaaggctgaggcgtgatgacgaggcactacggtgctgaagcaacaaatgccctgcttccaggaaaagcctctaagcatcaggtaacatcaaatcgtaccccaaaccgacacaggtggtcaggtagagaataccaaggcgcttgagagaactcgggtgaaggaactaggcaaaatggtgccgtaacttcgggagaaggcacgctgatatgtaggtgaagtccctcgcggatggagctgaaatcagtcgaagataccagctggctgcaactgtttattaaaaacacagcactgtgcaaacacgaaagtggacgtatacggtgtgacgcctgcccggtgccggaaggttaattgatggggttagcgcaagcgaagctcttgatcgaagccccggtaaacggcggccgtaactataacggtcctaaggtagcgaaattccttgtcgggtaagttccgacctgcacgaatggcgtaatgatggccaggctgtctccacccgagactcagtgaaattgaactcgctgtgaagatgcagtgtacccgcggcaagacggaaagaccccgtgaacctttactatagcttgacactgaacattgagccttgatgtgtaggataggtgggaggcttagaagtgtggacgccagtctgcatggagccgaccttgaaataccaccctttaatgtttgatgttctaacgttgacccgtaatccgggttgcggacagtgtctggtgggtagtttgactggggcggtctcctcctaaagagtaacggaggagcacgaaggttggctaatcctggtcggacatcaggaggttagtgcaatggcataagccagcttgactgcgagcgtgacggcgcgagcaggtgcgaaagcaggtcatagtgatccggtggttctgaatggaagggccatcgctcaacggataaaaggtactccggggataacaggctgataccgcccaagagttcatatcgacggcggtgtttggcacctcgatgtcggctcatcacatcctggggctgaagtaggtcccaagggtatggctgttcgccatttaaagtggtacgcgagctgggtttagaacgtcgtgagacagttcggtccctatctgccgtgggcgctggagaactgaggggggctgctcctagtacgagaggaccggagtggacgcatcactggtgttcgggttgtcatgccaatggcactgcccggtagctaaatgcggaagagataagtgctgaaagcatctaagcacgaaacttgccccgagatgagttctccctgaccctttaagggtcctgaaggaacgttgaagacgacgacgttgataggccgggtgtgtaagcgcagcgatgcgttgagctaaccggtactaatgaaccgtgaggcttaaccttacaacgccgaagctgttttggcggatgagagaagattttcagcctgatacagattaaatcagaacgcagaagcggtctgataaaacagaatttgcctggcggccgtagcgcggtggtcccacctgaccccatgccgaactcagaagtgaaacgccgtagcgccgatggtagtgtggggtctccccatgcgagagtagggaactgccaggcatcaaattaagcagtaagccggtcataaaaccggtggttgtaaaagaattcggtggagcggtagttcagtcggttagaatacctgcctgtcacgcagggggtcgcgggttcgagtcccgtccgttccgccacttattaagaagcctcgagttaacgctcgaggttttttttcgtctgtatatctattattgccagaatcgcaaaaatcctctgcattttacgctctttttcctcaacagtctgaagcccataatcacctcagttaacgaaaatagcattaaaagaggcatattatggctatccctgcatttggtttaggtactttccgtctgaaagacgacgttgttatttcatctgtgataacggcgcttgaacttggttatcgcgcaattgataccgcacaaatctatgataacgaagccgcagtaggtcaggcgattgcagaaagtggcgtgccacgtcatgaactctacatcaccactaaaatctggattgaaaatctcagcaaagacaaattgatcccaagtctgaaagagagcctgcaaaaattgcgtaccgattatgttgatctgacgctaatccactggccgtcaccaaacgatgaagtctctgttgaagagtttatgcaggcgctgctggaagccaaaaaacaagggctgacgcgtgagatcggtatttccaacttcacgatcccgttgatggaaaaagcgattgctgctgttggtgctgaaaacatcgctactaaccagattgaactctctccttatctgcaaaaccgtaaagtggttgcctgggctaaacagcacggcatccatattacttcctatatgacgctggcgtatggtaaggccctgaaagatgaggttattgctcgtatcgcagctaaacacaatgcgactccggcacaagtgattctggcgtgggctatgggggaaggttactcagtaattccttcttctactaaacgtaaaaacctggaaagtaatcttaaggcacaaaatttacagcttgatgccgaagataaaaaagcgatcgccgcactggattgcaacgaccgcctggttagcccggaaggtctggctcctgaatgggattaagcctctctgacagctcctccgggagctgtttttacatgctcgctaaggaaatcgataaaagcccggatgcgcgtacttaccgcacggtcgctgtaatagacggcactgaatggcatttccactggcaacactttatctgccattaactccaccaattctccgcgagcgatttctttgtcgatcatgtagtcggacaaacacgcaatcccgttgccactcaggcaaagctgtttcagtgtttccccactattggatgacaaaccgtacttcacctcatgtaattgtccatcgctacgggctatcggccaggtattgagggaagcgggttcagtgaatcccaggcaaatatgttgctttaaatcgtcgatcgtttctggcttcccgtagcgggaaatataatcgggggaggcgataatttttcgataactgttaaataacggcctggcacgtaagctggaatccgttaacgtaccagcgcgtatcgcgacatccacttttctttcgatcaaattaataatcgtttcggaggagactagcgacaaagtgacttccggatagcgttcacggaaaggcttaattaacggcatcagaaagtgcagcaccactggagttgcggcatcgatccgtaacagtccacgcggtgtattacgcgtctccataatttctgattctgccgctgccatctcctgcaaaattgactgtacgcgacgaaaataacgctcgccttcttccgtcaggctaagttgtcgcgtggtccgattaagcaggctaacgccaagtttcatctccagctttttcaccgcccggcttaccgctgagtttgcttgccctaattgttccgctgcccggctaaagctgccgctttcgacgaccgaaacaaaaatggcgagttcttccgacgtggctttcatttttgctcctgttgcaaaatagaagagatattttgaatttatttgtcattaaaccatcaggatgcgtgatatgtcatgcgatttaatgttctccataatgagcaaaattctgaccggtgtaagcacttgcttacataacaatatacaattgctcgttgaaagagtgagctaaaatccctataacagtagaaccctcccgagtgcggaagggttgacgtaatagaggtttcaaagtcaaaagtgcgaaaaaacacctatgccatgcgctatgttgccggacaacctgcggaaaggatcttaccgccggggtcttttgcgagcatcggccaggcattaccacttggggaaccgttaagtaccgaagagcgtattcggatcctggtgtggaacatatacaaacagcaacgcgctgaatggttgtcggtattaaagaactacggcaaagatgcacatctggtgttattgcaggaagcgcagacaacgccagagttagtacagtttgcgaccgctaactatcttgccgccgatcaggtacccgctttcgtgctgccacaacatccttctggcgtaatgaccctttcggcggcacatccagtgtattgctgcccgttacgtgaacgagaacccattttgcgtctggcgaagtcggcactggtgacggtctatccattacctgacacccgcctgttgatggtggttaatatacacgccgtcaacttcagtctgggcgtggatgtctatagtaagcagttacttcctattggcgatcagatagctcaccacagcggcccggtcattatggcgggagatttcaatgcctggagccgtagaaggatgaacgcgttatatcgctttgcgcgggaaatgtcgctgcgccaggtgcgttttaccgatgatcagcgccgtcgggcgtttggtcgcccgctcgattttgttttctaccgtggtctgaacgtcagtgaagcttctgtactggttacgcgcgcttccgatcacaatccgctactcgttgaattcagtcccggcaagcctgataaataaggtatgtcaggtctgccacagggcagaccaacgtttggcgctgcgcaaaacgtgagcgcggtggtggcgtatgacttatctgcccacatgctggatgtcgtggcacaagctgccgaagcccggcaactgaaaaatatcaccacccgccagggatatgccgaaagtctgccatttgccgataacgcatttgatattgttatcagccgttattctgcccatcactggcatgatgttggtgcagcactgcgagaagtgaataggatattgaaacctggcggtaggctgattgtgatggacgtaatgtctccgggtcacccagtgcgcgacatctggttacagacggtagaagcattacgcgatacctctcacgtacgaaactacgccagcggtgagtggttgacgttaatcaatgaagccaatctgatagttgataatttaattacagataagttaccgctggaattttcttcatgggtcgcgagaatgcgtacgccagaagcgttagtagacgctattcgcatttaccaacagagcgcatcgacagaggtgagaacgtattttgccttgcagaatgatggctttttcaccagtgatatcatcatggtagatgcacataaagcggcataaataaaaaaggcaccgggggaatcggtgcctttttattatctggtttgtcaggaatctggcatgttgttgtttttcacaaacaacgtcagcttatcgcctggttgcagattcgcagtgtcgctgttccagcgcatcacatctttgatgttcacgccgtggcgtttagcaatgcttgaaagcgaatcgcctttgcgcacacgatacgtaatgctatcgctgttgtttgccagtcgctgtgcgctactgcctgcaccaatcgtcaaactttggcctggcttcagcttagatccgcgcagtttgttccactgctgcaaatctttggtgcttacgccgagacgtgaagcgatacttgaaagcgtgtcgccagagcgtacggtgtaaacacggctgttaagcggcgtattgtcggcaaccagcgtcgactgtacagcagcaatttcgcctgaagccagagattcacgcagttgatctgcatgcttctttggcaccatcacgtactgcgggccacttgcgcccagcgtggagccttttacgccagcgttgaatgtcttcagcttgctgacggaaatccccgccatatctgctaccttcgccatttcaaccgggctgctcaggtgcacacgcgccagagcacggctttcatcggtcgttggcagacgtacgccataacgcttgctgtttttgagaatatcactcaatgccagcattttaggcacgtactgcttcgtttcctgcggcaacggtaacgaccagaagtccgtggatttcccacgcgctttgttcgttttaattgccttcatgacccgaccttcgccgctgttataagccgctacggtcagaagccagtcgccgtcaaacattttgttcagacgctgcatcatattcagcgcggcagttgttgaagcaacaacatcgcgacgcgcgtcataattgcgggtctgtttcaaaccataattgcgccccgtgctcggaatgatctgccagatgcctgcggcattggcgccagacgttgcgtgaggatcaaaagcgctctccactatgggtagtagtaccagttccataggcatgttacgttttttaacttgccctgctatccagtacatatacggctctgcccgtaaagttacatcgtggagatagctcttattgcgtaaatatttctgtttctgttcgcgaatccggtcattttccggaattcccatctttagctcgtcgccaatgaaagcccacaagtcaccatctggcgcgatagacgtcccatcgtccatccatcgtgcctgacttgtaaactttgctgcttccccttgaccagctgcagaaaggctctgtgcgtgctgttgaacgttgccggtactctggcaacccacgagcaggacagaggcgagtaatatcgcttttgccttcatgtgtgtgtcaatagttgcttaaaagacgaccgatcataacggcgaacggagccgatgacaagaaagttttatcagaacctatctttctttgaccttaaccatgcaaaacgctcttcaggttgttgcaataatgtttcttcattaattacattaattaaatcaatatcttccgttcttaaaaaaacattaatttgccgctcatttttcagaattacgggtagtgttatttgattttttgcccgtaactccttaactttacgataataatcatttatggacaaatcgtgcggaagaatactcaaagcaaacttcatatttgataaggtatattcatgagcacaacataccaatgtatcgtcaggtaacgcacttaactttttaagtgattgatacatttgtgatgctgtcccttcaaacaaccgaccacacccaccagaaaacagtgtgtcgccgcaaaatagataaggtttactgaagtaacagatatgtcctaaagtgtgacccggcgtagcaattacactaaattcatgccccaaaacgaaggcagtttcgccatctttgactacctgtgttgttcccttatcttgtgtctcttgtggaccatacaccacaatttgtggaaacttttccaccagttcttttacgccgccaacgtgatcgtggtgatggtgggtgagaaatatggcctccggttgccagttattggcggcaatggcgtttaatactggctctgcgtctccgggatcgacaatcaggcagcgacctgcttcatcattcaaaacccagatgtaattgtcatcaaaggcgggaatactgttaagattcatagattacctctcagtgtgaaacggaaggttgtgatgaaaccggcaagagtccctcaaactgtcgtggctcctgattgctggggcgatttgccctggggaaagctttatcgcaaggcgctggagcgccagctcaacccgtggttcactaaaatgtatggttttcatctgcttaagattggcaatttaagcgcagaaatcaattgcgaagcgtgcgcggtttctcatcaagtgaatgtttctgcgcaaggaatgcccgtccaggtacaggcggacccacttcatcttccttttgccgataaatccgttgatgtttgtctactggcacatacattgccgtggtgcaccgatccgcatcgtttattgcgtgaagccgatcgggtattgattgatgatggctggctggtcattagtggcttcaatcccatcagttttatgggattacgcaaacttgtgccggtattgcgcaaaacctcgccctataacagccggatgtttactctgatgcggcagctggactggctctctttgttgaattttgaagtgctacacgccagccgtttccacgttctcccgtggaacaaacacggaggaaaactattgaatgcgcatattcctgcgcttggttgcttacaacttattgttgcccggaaacggactattcctttaacgctaaatccgatgaaacagagtaaaaacaagccacgaattcgccaggcggttggagccacccggcaatgtcgtaaaccacaggcttaaacttcaacttggtagcctgtatcttccagtgtgggattcatcgccgcggcacgagccagttcatcacagcgttcgttttccgggtgtccggcatggcctttaacccattcccatttgatttgatgctgccccaatgcagcatcaagacgttgccagagatcgacattttttactggttttttgtctgcggttttccagccacgttttttccagttatggatccactgggtgataccctggcggacatactggctgtcggtactcaaaatgacttcgcaatgttcttttaacgcctccagcgcgacaatagcggccatcaactccatacggttgttggtggtgcgggtgtagccagcgctaaaggttttctcgcgtccgcgatagcgtaaaatagcgccgtaacccccaggtcctggattgcccagacacgaaccatcggtgaaaatttctacctgtttaagcatctctggtagacttcctgtaattgaatcgaactgtaaaacgacaagtctgacataaatgaccgctatgagcactgcaattacacgccagatcgttctcgataccgaaaccaccggtatgaaccagattggtgcgcactatgaaggccacaagatcattgagattggtgccgttgaagtggtgaaccgtcgcctgacgggcaataacttccatgtttatctcaaacccgatcggctggtggatccggaagcctttggcgtacatggtattgccgatgaatttttgctcgataagcccacgtttgccgaagtagccgatgagttcatggactatattcgcggcgcggagttggtgatccataacgcagcgttcgatatcggctttatggactacgagttttcgttgcttaagcgcgatattccgaagaccaatactttctgtaaggtcaccgatagccttgcggtggcgaggaaaatgtttcccggtaagcgcaacagcctcgatgcgttatgtgctcgctacgaaatagataacagtaaacgaacgctgcacggggcattactcgatgcccagatccttgcggaagtttatctggcgatgaccggtggtcaaacgtcgatggcttttgcgatggaaggagagacacaacagcaacaaggtgaagcaacaattcagcgcattgtacgtcaggcaagtaagttacgcgttgtttttgcgacagatgaagagattgcagctcatgaagcccgtctcgatctggtgcagaagaaaggcggaagttgcctctggcgagcataaatacctgtgaaaggcgctaaaaatagcgacttgggcgatttttgcagcaaacgattcaaaagatgagaaaaaccgttgacgaaggtcgaggcaatccgtaatattcgcctcgttcccaacggaacacaacgcggagcggtagttcagtcggttagaatacctgcctgtcacgcagggggtcgcgggttcgagtcccgtccgttccgccactattcactcatgaaaatgagttcagagagccgcaagatttttaattttgcggtttttttgtatttgaattccaccatttctctgttcaatgattttactctggcgtaggtgcgtgattctcgcttgttgtctcattcattaaaattcaataatgatatcgaaccattcagcttaaatatatttctagagaataaatttatattgattaaatgaatgtatatttcaaattgattttgtttgttattatttaagtgaggtatataattagagtccgttatcaatgctaaatattctaatcattatgacaggcgagggagtgtccaattatgaattcaaaaaagctttgttgcatatgtgtgttattctcgctgcttgcaggatgtgcctctgaatcttctattgatgaaaagaagaaaaaagctcaagtcacacaaagtaatattaataaaaacactccccagcaactgacagacaaagatttattcggtaatgaaaccactctggccgtatccgaagaggatattcaagctgcgcttgatggagatgagttccgcgttccccttaattctcctgtaatacttgttcaatccggcaaccgcgcaccggaaaccattatgcaggaggagatgcgaaaatattatactgtttccacattctctggtatcccggacaggcaaaagcctctgacttgtaacaaaaacaaagataaaaatgagaacgaggatgttgccagtgctgagaatatgaactggatgcaggcactgcgttttgtggctgcaaaaggacatcagaaagcgattattgtttaccaggatatgttgcagacaggaaaatatgactctgcgctgaaatcaacagtatggtccgactataaaaatgacaaactcactgacgctatctccctgcgctacctggtacgtttcacgctggtggatgtggcaacaggtgagtgggctacctggtcgccggtgaattatgaatataaagtgcttccaccattgcccgacaagaatgaagccagtacgactgatatgacagagcagcaaatcatgcaacttaagcaaaagacctataaagcgatggtaaaagatttggttaaccgctatcaataataaattatatctgccgccaggaatttctggcggcaataatacaaaattctttgcataagaaatttttcttgacaaagacagtgcaagaaaggacatggaatccggagttaaaaactgtttgttttagaatatttaattatttaactgctgaatcttccttgcgagaaatatatccattattacatttcatgccatttttaatatagattgctcctgggaaaattcccgtattattaccgcaggggtgataattagtattgacatatcctgtgacaaaaggagctattaaaggtgctattacgatagctattagtaaaaatataagagttagctgtattgttatgtctgtggcgaaattgactaccttcgtttttttgattaagaatgattttattatcgtaagtaaaattacatgaatatttaaaaaggaaaacgacatgaaaccgaagcacagaatcaacattctccaatcataaaatatttccgtggagcattttattattgaatatagaggtttaactccggtaaaaaacaaagaagcattgaatgcagggaaaaataatatggccataaaaaacatcgaaagaaactcttttaatttaacatgtaaacgcatggttaatcctcatatcacgggtggagtgttaagaacatacataaatggagtcatgttttcccttttccatttatcaagttcctgttgccgttttagtccatctctaattgcatattttaatttttctgataaatggcattgagcatcgatttcatttaaaacaactgtacacactatccctgtcagtaaaattgctcctccgacaagaattactggaaagccaaagctaacacaggcaaaagaagccagacttccaatagcggttgcaacaccaccggctataactgctttggccacatccattgaaaaatcgccaagaaaattaaccagatctcgctctgaactcataataaattctatggttctccaggctactgaaaaccagatacagaacttaactccttttattgattcagataaagctcctcgccagccaatagcgagttccagaacttgaggcgctcgtgaagagaaaatatatttaccgagcttttctaaaagccaggggctggatgttgtgatttttatatatttctctccaagtatttcaaagtaacttgcttttgtatactttaaggcattaaggttaaatataattttcccattgtcatcaaactcagtcattaatttacccgcgttaactaaccaggcgagtgtatcttttatacctgaaggatgtgtagtgataaaatgaatgtaatcaaatgatgttattgggctgagtattttttttgcaacatcaagtgtcaagggaataacatgatgagtgttctgatgccttaactcatcaatgagtgggacgtcgttaagataagggtgctgaggtactagctggtttatcggctgagccccccgaagaatgtcacccacataatcagcccactgtgcattctgtgtgttgttgttattccttaaaccagccattttatctctccgcaatagtaatttattatgttattacagtaagttactgtacacgatcctgccatttactcattgcattcgtaccggctaacgtatgctcccaggaaatatcttcataaataaaggcaattctctcctgtggttccagttctttttccaggacagcatgcggtgtgacaaaatcaatacttgatattcgggcttttgacagatttattttataataaggctggtaaatacccgctttactggttcggtagagtataaattcacatattgccattttttcattgtcactaagtgcttttgccagcaatggtgaggatttatcaaccggtttggtgataattaattcatgatgattgacattttgacttcttgagatggaatgcattaacgcataaaccatgatctgatctttatgttctggctgcgctttgtttccgacagaatcaagcgttgagcaacctgctgaaattagcccttgtgtctctccactcaaagataaataacttatatttgccatgataatctcctttaattaaataattatttttcggccgtggtaccggttgccgcctctggcatgacgttattcttcagcagcagccagcggcttaacacgccttcgagtcgctcattaatttgtttttccagcgcatctgtattctgcttctgcgcacgggcatcatggtactgcgtcaacagagactcaacgggtgtttcctgccccagtccccgctccgcctgccagatgacatttttgatataggaaagggttagtccctctttctcgcgctgcatcactagatctgcaaaagcatgtaagtcctggcgggtctgcaaccagccacgcaactgcgggctactctgtgcgcgggttttgagtgcctcattccattgtgtcgaggcctgttgctgttgcaggctttccggccagcgactgtcggcaacacgcatcatctgcatcccggtttccagcggctgtaccggggaggtatcaagaagttgttgcagcctgcgctcatagttttcgagttcaggtgaggccatccacaccgttgctgcgccctgagcggtgtcgttaacctgtaacagttgctgctgcaccggatagacctgccaccaccacaatgctgaggcgacagccactgaacaggcgatccctgcgataaaccctcttaccgtactgccttgctttatcacactggcctgtgggggattctctgtcagactgcgcacttccactttcatctcaggcaggccgggcaggggaggcactaccgcttctggtgtggaagatgcctgtgtttccggggcataaatcagcgttctgaccgtggtctgtgcggcgttctcagtgttactcttcagctggggttcaagccgtttacgcgtgttctgcataaaatagagcagattctccacgcgcggaacgcgcttcagttccacctgctggagcttatcgcagataagctgcaatgcccgctctgtgcggtagatcagtggtaggtcggattccgcaaaggagatttgctgacgcagaatattgccggttcgggagttaaaccagtccagcatttcagtacgcgccgggccgccctgcggccagaacttatcccagtcgtggcttaccattgccgccagcagttccgcaccttcgcagaatcccgccagtccctgtgtccgtgtccgggcaagcgtatagtaggtggcggtgtgtaaatccacaccgttggctttaaaaatcgccagcgccagcgactccaccagtttccagttcagctcaggctgtgacgggtggctggctttgtttatttcctcgcggatggcgctgaattccggcagcccgcgcgggtcactgccggtaacgatagtttgtgtcagtacgttactattcatccctgcctcctcagtacagtgtgtctgacagaccaaactggctgaacaacccaccgctgaacgggttatcttccgtgtcggtatgcacacggtaggtcatcgcgccaccgtccacgctaaagcgcacggtaaagttgccatcctgtactccggtcagttgtccggccccgaacaggcggaactgcgcccacggcccgctgaagctgatactgcgcggcgcgttgccgctggtgccgatgagcgtcagcttactttcgttgccttcgcgcatgttgttaggccagaccagatgggcggtatagttacggccctggctgtaatcgactaactgaccgtcaaggttcagtacactgcggcgtttattgcctgaaagcgataccgtttccacggcaaaggatgttcccagaccgttctgtttgctgaagaagatgtcacggattttctgcgcagtttccagttgcgcaataatatcttcgcgaataatgacgttgttatcgccatcctccagactcaggtcattatcgataaacagcttcaggttctgctggtagaaggtatccagtatgccatccggtttaaagaagcgttcgaaggcatccagtgaggcatcctgtgcagaacgcggattaaacggatagttatttgccagttgctcgttaaacggtttcaccacgctgtcgcgccagtccacttccatataatgaacagcctccaccatcaccacatgccaggcctggtcagtcagtctgccaacccagcggttgagcggagcaggcagcgtttttgccatctggcgggtggcgaatatcggatcgctgctgttctgatcaagccgtaactgcacggctttcagcgccgatttccctggtacaggcgcgttctggattgccagcaggtagcggtgcaactcggtgagttgctgatacacggcctgcatcgtgctttctttgtctttctgtactgccagggtactgttttccggggcgaattcatgcccgaggcgggtgagtaactggtaatccggctctgccagggcttcctcccgttctttggcagagagtttttcagaaaagacgcctggctgtgtgttgtcacgcaggacggtcagcgcccgctgcaaaggctggtcgccgctgataacctgctccagcgccccggtcagttgtccgatggactcaaaattgcggatattcagattgtccatcccggcccgccaggtggcggtgtagtcgctgatatactgctcggtcaactggcgctggatttccgcgcggtcggcgtcactgtatttcacgctgcgggtaaggttaagtacccaggaatccatcgccgtcagttcaaccagttcatcgcgctgttttacaaaatagctttgcaggccgtaacgggtaagaaactgtggaacaaccagtttgttgtcatcggcagatgtaaacacctggtcaaaggttggccctacctggtcacgcagattgaggtcggcaggaagaacgcccagcgcccgcgttttcaggctctggtaaacccgctggtagacaggcagtttgctcagttctttctgtgctgataccacgggcttgtcatatggcgtccagcggctgatggcgtcaccgtcgcccgcctgacgctctgcatgccagtcagtatgagccagcgcgtagtcaagatgggacatcagttgtgcctggatatcgcgctggccgtggaatttttcgctccagcgttttgccatatactgcttcaccacctcattgttacgtccgcttttgtcctccagcattcgcattacgcgcagcaccgcgagtttttcttcactctccggcggcgcggcgttcatcgctttgaccagcccgttaaacagcgagggcaggtaacgttgctccagcagttgcagataggtctgttccacataaggcccgatacgtcgtccctggtacagtcccatatcggccagacggctgcggtcgccccagtcgccataggccagtgtggcatcgcgtaccgggttcagaagcggcagttgcaggttgccaaagtcatcttccccctgcggaggcggcacgtccataaaggctttggcctgcttaagcacggtgatgccggactgatagttaccgttgtaatagtgatgccagccggtgatgagcagaagtgctgccacgccgcctgtggcagagaaaactgtcaggcggcgacgggaacgtatcagccaggcgcggctctctgttgccagattaggctctgcgagtaatgcctgcgggaacaggctgcgggtgaaataaggcgcggtgtccaccaggggccaggacgccagtgggttattgcccagccggtactggcgggcggcagactgggtgaatatatcatccatctgcccacgctgaagcgaagaggtgagatagacaccacgcagcatcacgttcatattttcgccatcaagcagaccctcaagcagtgacaccagcggttcacggcttccctgcatctggcgggaaaaactgaataaagacgtgcgggtgtgagtctgagcgaccatcagatccggcaacgccagattcattcgatccacccatgtctgccagaaagcattcaactctgttcgccagtcatcattttcatgggcgcggcgggtgaacgtgacgcccagaatcgcatcgcgatcctgtctgttcagtgactggaacagggcggcaaaaccctgcaataaatcaagccgggtgagtaccacgtaaaccggtaactggcagtgaagatgctggcgtatatcctgcaagcggctgcgcagcgtctgtaacagatgctcgcggcggcgtttgtctgcggtaagcagatcgggtaaatcgagtgtcagaataatcccgttcagcggctggcgcgcgcgcttttctttcagccagccgagggcatgttcccacagacggcgatgcaggatatccgcatcagcgggagcgcagagtgtgccgtcgatatcaaagatcaccgcctgtttaccgacatggggcgtaaggtacaggcgttgttctgcgccgcgcgcgccctccggggcataaataatgtcggacggaaacccctcgcgcagcagtgtcgttttgccactgcccgccgggccgatgaccatataccacggcaactgccacaggaaacggcggttgtcgagatagcgttgcaggcgcagcagccagcggtcaagataacgctgctgggcgttcagttccacgctgagcggatcaacggcttcctcgcgctgttgcttttgcattttttcaagctgttgcaggcgcttcatcacccggacggtaagccacatcagggcaataatcccccacgccgccgttgccagccagcggttcgccagtggtttgagccactgttcttcatacagcgtccacgtcgggcctttccaccagatccacaccagcagaaaaatccacgccagtatcagcagccagaaagcagagactttaaaccggggcatcgccggtcgcagggctgatttgagtccgctgagtagtcggggtgttggtaatctgaacacaaaaactcctgttctcttttattgttctgccgtgaatttttgttctagctgctcaagcagggacggctcccagtctgccaccatcatctgcaatcccatcctgaacaacatccggtactgctgctgcgcaagctgtaccagccccgcctcttccgtcaactgtgcggcaaggtactggcggtgaaactgatcgcggggatcgccttcgggtagcatgtccagatatcgcagcgccgcctccagaccctgctcagcaaaacaggctctggctgccttcgattcctcaccgatttgcgcaaccggtgcaactttggcgtcgggcgaagctgccagccattgtttcgtctgctcactgataaacggtgtgtggtcattaaacagcagcccggtaagctggggcagacgctcaaggaagcggatgacctcatcgcggatggcgtctgccacctgtttgtaacccagacgcagcgccgtctgtgcagaaaggcagtgaccatccagccagtaaggagccagcagtacgcttttctccacctgctgccacagcgccatatcggcactaccgagctgagcatggtaatctgccaccatatcggcggagaccgcagccagtggagtacggccatcgctttccgcctggggcgtactggtgatgttctgccaaagcgcatggcggcgcagacggtagccctgcggtgaatccggctggcgttcacataaaatggccgccacttttaacagcgtgtcgcgccaggctttgtcgtcgtgactgtcgatgacgatttggggagccggagcactgggttgcgtcacgccgctttcagacgtggcggtggtctgtggtgaactaccggaggccgccggagtggggacaggagccggtgccgcacgattaaacgcacgctggtacagggcaaaaagatcatcagtagcctgtgccagttccggggcgttatgtgactgccagcattgcgccagttttgccagttcccctgacagcgcatcgcgctgctctgtggcggcgttctgtgaaaaaccttcaatacctgtttcaaagcgtttaatgacctggctggcaaagcgttttttatgcgccatattctgcggcgcagccaccgcccagtaatgctccacatacagcgccagcaggcgcaatgcgagatgaggatcaccggcgtgttgcagggttctcagcagatgcgccagcagacgaaaatccttactctccgaagccagaatgaccagcccccggcgctggagttccgggatatccagttgactgtgggccagcgatcccagcttgacgatttcgccgtcgatatactcccagttcgggttgtcatctttcagcgccgatgccagtttctcttccggcaggttttccagcaggtgcgatatccagacattcggatcgcgtaagtccattgccatatttttattctcccgcccagtggcaggcatcgcgcaggggagcaatcgcccttgccagcccgtcaatgttaaaggtcagctttccggcggcattgtctgcgccggtatccaccgtcagcgtttttgcgccgaacagttgcttaatttcatcaatcccggataacccccggctggactccagcagggtgccgttctcgcgcacaaaccagtggctgcgcaatgcccggttgtcggcattcagagtgacggcgatatcatggacatccagagggtgcatcagcgccacctgcatccgggtgatattgtccacgcaactgaacatcagcaccgggcgtggcggaacatgaccgacagccgctgtaccggggaaactgtttcagcggtctcttccggttgttctctgtcggcctcatcagccggtacggcaccggtattatcctgttctgactctgactctggctgcgtatcctccacggtatctgcgtccggcaacggcgccgcatcgtcctctgccacgcccagtaactgctggcgcagcgcgataatctcccggaccagcgtctgctgctggtgccaggccgcttccagttcatccagcgccgtcagcgtttcatcatactgcaccagcacctctgtcatccgtgatgtgtcggtacgcagtccgatgcgaagctcgcgctcaagctggcgaatttccgcctcctgctggtggctcagagtggtcagcgccgagatttgcttcggcggcgacgacaggttgatggccacacgggcgcaggcggtatccagcacatcaatcgctttgtccggtaactgacgcccggagagataacgctcgcttaatgtcgcagcggcctgcaaggcgtcatcatcaatcagcacgccgtgagactgttcatagaccgccgacagaccgcgcagaataatggtggcttcggcagcgttgggttcgctgaccttcaccaactggaagcggcgcgacagggcggcatctttttcgaagtattttttgtactcgctccaggtggtggcggcgatggttttcagctcgccgcgcgccagcgccggtttgagcaggttggagatatccagcccgccctgctggttgcccgcgccaatcagggtatgtgcttcgtcgataaacagaatgaccggcaccggggaggaaatgacctccgccatcagccctttgaaacgtttttcgaattcacccttcaccgacgccccggcctgcaatgcgcccaagtcaagggtcatgatatcggtgtttttcagcttgtccggcacctggcctgccacgatgcgcagcgccagcccttcaatcagtgcgcttttgcccacgcccgcttcgcccaccaccaccgggttgtttttacggcggcggcagagaatgtcgatcatcaggtcgatttcgtggtcgcggcacagtaccgggtcaagcctgccgttacgggcgtctgcggtcatgtttttggcatagcgggcaagcagggtgtcagaggcgtccgtcattgtgcctgcgcctttaccgtctgcatccggcacgactgattccgccgactcctgtgtccactgcacaaagtcctgttgcagacggtcacggttaatgccggtcaacagccgggcggcagcaggcggtatataacgcagcggcgaatgcagcagggccagcagcaacacgccgccgcgcagttcgctgtgctgcatctcagccgacgccagcagccagccctctttaagccactcaaccagcatcggggaaaacgccgggtaaccgcatcgcggaagatgcgcactatgtctaccgccacgatgaatacggcaggctggcggagaagacggaccgcatcccggaaggggtgatacggatgcacgacgagcggacccaccactaccactacgacagccagcaccgcctggtgttctacacgcggatacagcacggcgaaccacaggtggagagccggtacctctatgacccgctgggccgccggacgggaaaacgggtatggcggcgggagcgtgacctgacggggtggatgtcgctgtcgcgtaaaccggaggtgacatggtacgggtgggacggtgacaggctgacgacggtacagaccggcaccacgcgtatccagacggtataccagccggggagcttcacgccgctcatcagaatcgaaacagagaatggcgaacaggcgaaggcgcggcaccggagcctggcggaggtgttgcaggaggacacgggtgtgacgctcccggcggagctggcggtgatgctggggaggctggagcgggaactgcgcgcgggagcggtgagtgcggagagtgaggcatggcttgcgcagtgcgggctgacggcggaacagatggccgcgcagatggaggcggaatacatcccggagaggaaacttcatctttaccactgtgaccaccggggactgccgcaggcgcttatcagcccggaaggggaaacggcgtggtgcggggagtatgacgaatggggaaacctgctgggcgaaaccagtgcgcagcaccttcaacagtcactccgtctgccggggcagcagtatgatgaggagtcggggctgtactataaccggaaccggtactacgatccgttgcagggacgctatatcacccaggatcccattgggctgaaggggggatggaacctgtatgcgtatccgctgaacccggtgcagcggggggatcctcttgggttgtctggtgagacactggttcttggttctgccacaacagtaacaggaacaaaatttgggggggcgttactttcgggtggggcggcgacttttgatgcagtcacgacggctatggcgtctgctgcccctgctcttggagcaatggctgtggtcgctgggccaatgggatatgaccttctcgctaatgatgggcgtgccgggaaggctctgagcgatgggcagttaataaattctcaggctgaaatgtgttactggaccagtagttgtcctttagatagcccacatgagaatgataattcgtcagggagtcagccgaatgttgggaaggatttgacggatgaagagaagaactgcctggccggcggcagtacgggaagcccgggaggatggggaccagaagatgagaatagcgcaagggatcgtatgcagcatgaacggtataaagatgaattgcgacagaaaatgggaaaacccgacgttacagattcaaatttgaaaaatattatagacgatctttatcggccaaatgcaaaagtaggaagtggaagcacagcagatgctgttcgttatgaattggccacaggtgaaaaagttggtggtagaggacatgtattgaaagcacaggattatacaagggctttacaggattggttggataagaatccaacagcatctccaggggatcgagcagcagcagaaaacgttcttcaggatttacagaatgctttgggaggcaagtaatgaaccaatatattgctagttatatagaaaaaatggcatcattttccactgttttgtctgagacagtctcattagctaatgaatactggcatccagaaacgccaccggtggttatgttgttctctcaggttggaaaaacgattgtaaaaaatttttatgaaatgggggatattgaaagagaaaaaatatttaaacatgtcgaagatggtatggtctcgcttgatgatgaattggccacagttgtagctacagggcttatagaggcaatagtcactgcgaccgatagcaattctttactttggcaagatgtaagtaaatttctgggtgacaaatcaaagtctcatgcattagtgtggaaaaattttggtcaggagtgatattattcaagaagtattaagctcgctattgagatcttaatgcttcttgagattaaattaaagttaggacgaagtaattgcaggtggaaataaatccatggtgacgtgtggcaatggctattagatgttatggtgtgatgggttttggtgatttaagagctaagttagattgccttatgaaaaagtatggttatatatttaatgatgtgtatcatatatttaaataaaaaacggttctctcttgtcaagatagtaataggatagattattgtgttgataaatataattaagagtctactttgttgattttagaagactttggagcagggaaagaacatcagaagtacactttttgtactaaataattcgcggtaaatgttcaataattgagatattccttattacctaaaactatttttcatagcttatacatgatcaaatactccttacataattaaggagaacaaaatggaacttaaaaaattgatggaacatatttctattatccccgattacagacaagccaggaaagtggaacataaattgtcagatattctactgttgactatttgtgccgttatttctggtgcagaaggttgggaagatatagaggattttggggaaacacatctcgattttttgaagcaatatggtgattttgataatggtattcctgttcacgataccattgccagagttgtatcctgtatcagtcctgcaaaatttcacgagtgctttattaactggatgcgtgattgtcattcttcagatgataaagacgtcattgcaattgatggaaaaacgctccggcattcttatgacaagagtcgccgcaagggagcgattcatgtcattagtgcgttctcaacaatgcacagcctggtcatcggacagatcaggacggatgagaaatctaatgagatcacagctatccctgaacttcttaacatgttggatattaaagggaaaatcatcacgactgatgcgatgggttgccagaaagatattgcagagaagatacaaaaacagggaggtgattatttattcgctgtaaaaggaaaccaggggcggctaaataaagcctttgaggaaaaatttccgctgaaagaattaaataatccagagcatgacagttacgcaattagtgaaaagagtcacggcagagaagaaatccgtcttcacattgtttgcgatgtccctgatgaacttattgatttcacatttgaatggaaagggctgaagaaattatgcgtggcagtctcctttcggtcaataatagcagaacaaaagaaagagccagaaatgacggtcagatattatatcagttctgctgatttaaccgcagagaagttcgccacagcaatccgaaaccactggcacgtggagaataagctgcacaggcgtctggacgtggtaatgaatgaagacgactacaaaataagaagaggaaacgcagcagaattattttcagggatacggcacattgctattaatattttgacgaatgagaaggtattcaaggcagggttaagacgtaagatgcgaaaagcagccatggacagaaactacctggcgtcagtccttgcggggagcgggctttcgtagtaataccccgactctccccgtccttaaacacaacccccactcaccacaacctaaactcatccgcatcctgccatgccggaaacttttctctatattcccgcaatgctgccatcgacagctccgcatcaatgcgcgttgcctgatgcgcgtcggcagtagcgataatctctccttgcggattaatcacccggctgtcaccgcgataatggcagccgttgccatcgctgccgacgcgattgcatcccgccacatacgcctgattctcaatcgcgcgggccgtcagcaatgcctgccagtgcagagagcgcggagcaggccagttggcgacgtacagggcgaggtcataatcgttgagattgcgcgaccacacaggaaaacgtaagtcgtagcacaccagcggcaaaatacgccagccgcgccattccacaatcactcgcgcattgcccgctttataatgtagatgctcatctgccatgcggaacagatgacgcttatcataaaaatgtaccgtgccgcccggctcaaccagcaaaaagcggttaaccgaaccagactccgtttgtaatgcaacactgcctgcaatcagcgcattgcactgctgcgccttagctgtcatccagttcactacgtcatcttgtgctagcgacgaagctgccgcttccatggcaaagccgctggtaaacatctccggtagaacgatcacatcgcgcccggtaataccttccagttgacgatcaaaatgacgcaggttggcaggaccatccatccacaccagtggttgctgcaaaagcgtaatcttcaaaccaggcacggtgtacaactcctttatgcgaagggttttataactttaacaccttatcaggcagttgccttagcgcagaataaattgataacaaatgctgatattggaaatatctgatttgcaaattatcgtgttatcgccaggctttaggaggttaataacatgggcaggataagctcgggaggaatgatgtttaaggcaataacgacagtcgccgctctggtcatcgccaccagtgcaatggcgcaggatgatttaaccattagcagccttgcaaagggcgaaaccaccaaagctgcatttaatcagatggtacaagggcataagctgcctgcctgggtgatgaaaggcggtacttatactcccgcacaaaccgtaacgttgggagatgagacgtatcaggtgatgagcgcgtgcaaaccgcatgactgtggctcgcaacgtatcgctgtgatgtggtccgagaaatctaatcagatgacggggctgttctcgactattgatgagaaaacgtcgcaagagaaactcacctggctgaatgtgaacgatgcgctttcgattgatggtaaaacggtgttgttcgcggcgttgaccggcagcctggaaaaccatccggatggctttaattttaaataattagcggataaagaaacggagcctttcggctccgttattcatttacgcggcttcaactttccgcactttctccggcaactttaccggcttcgtcgccagctcttccggatcaaagtcatcaacgttaatactgcgcagacggctttcttcagctttcaccagaatagcggcttcatctttatcaatcagccccttcaccagcgcgttgtgcgccagttcatccagacgggtaaacggcaggtttttacccagctctttacagatccgctgatgaattgggtcggcggcaatcacatccaccagcgcctcttccagcaagccaaccggattatgctcgctcggcgtcaggtactgaccgcgaccaatgcgggaacgggtggcgttcggcacttgtaaaatcttcgccactttatgatccagcttgtcagaaggtgccagataatgacgtccggtcgggaagatcaccacattcagcagcccggcaaccacgcggttcgggaagttttgcagtaaatcatccatcgcctgttcagcctgatacagcgcatcttgtacgccccagtgcaccagcggcaggtcggcttcattacggccttcgtcgtcataacgcttcagcacggcagaggcgaggtagagctggcttaaaatatcccccagacgggccgagatgcgctcgcgacgtttcaggctgccgcccagcactgccatcgagacatcagaaagcagggcgaggttggcgctcaggcggttcaggtgctgatagtagcgtttagtggcatcgccggttggcgtgctgctggttaaaccgcgcgtcaggcccagccagaagctgcgaactttgttgctaccgacgtggccgatatgtttgaacaacagtttatcgaacgcgttgacgtcattgttcttcgccgcttccatctcttccagcacgtacggatggcaacgaatcgctccttgtccgaagatcatcatgctgcgggtcagaatgttagccccttcaacggtgatggcaatcggtgcgccctggtaagcacgcgccaggaagttgctttgcccgagcataatgcctttaccgccggtaatatccatcgcatcaataatcgactgctgcccgcggtgggtacagtgatacttaacgatagccgacagcacggcaggtttttcgccgagcataatgccgtaggtaatcagcgatgccgcagcatccatcacgtaggcattaccggcaatacgcgccagcggctcttcaatcccttccatcttaccaatagagattttgaactgacggcgaatgtgagcatacgcgccggttgccagcgctaccgatttcacgccgccggttgagttggaaggcagggtgatgccgcggcctaccgagaggcactccaccagcatccgccagccttgcccggccattttcggcccgccgatgatgtaatcgatcggcacgaagacatctttaccgcgcgtcggtccgttctggaacggtacgttcagcgggaagtggcgacgaccaatttccacgcccggcgtggtggttgggatcagcgcacaggtaatgcctaaatcttctgcaccgccgagtaatttttccgggtcggagagtttaaacgccagcccaagcacggtcgcaatcggtgccagcgtaatgtagcgtttgttccaggtcagacgcatccccagcacctgctggccctgccattcgcccatgcagacaatcccggtgtccggaatcgcgcccgcatcggaacccgcttccgggctggtcagtgcaaagcaggggatctcctgaccacgcgccagacgcggcagatagtgatctttctgctcgtcagtgccgtaatgttgcaacagttcgcccgggcctaatgagtttggcacgccgacggtaatcgccaggatcccgctcacgccggagagtttttgcagcacgcgagactgggcataagccgagaactccagcccgccgtactcttttttgatgatcatcgcgaagaaacgatgctctttaaggtacgcccacaactccggcggcagatccgccagctcatgggtgatctggaaatcattcgccatccggcaggcttcttctaccgggccgtcgagaaacgcttgctcttcggcggtcaggcgcggctgcggatagttatgcagctttttccagtccggcttgccctggaacaagtcgccctcccaccaggtggtgcccgcatcaatcgcttctttctcagtgcgcgacatcggcggcatcaccttacggaaaccgcgaaataccggcgcggaaatcatcgacttacgcataggcgcaaagttaaatggcacgaggataatggccagaggcaccagtacccacgccgaccacagaccagcaacgccgagggcggctgtccaggcgagcaaaatcagactgctgataaataagctcacgcggtgatagaacaacgcgccgagcaggacaaccgtagcgagaatactcaaaatcatcataacgaaaagccccttacttgtaggaggtctgaccacttgtgatgatatggttgtagtggatgtaaaaacatttagcaatatgtttacaatataattacaacaaagctcacattgttgctgtttttatccgcacttcaggtcaaaaagtcctggtcatagcacctgcccgtacttctcgcttttggcggtatccggtacactgcattttgtctattacatttatgctgaaggatatcctcatgtaccaggatcttattcgtaacgaactgaacgaagcggcggaaacgctggctaactttttaaaagatgacgccaatattcacgccattcagcgcgcggcggtcctgttagcagacagctttaaagccggtggcaaagtgctttcctgcggcaacggcggttcccattgcgacgctatgcactttgccgaagagttgaccggtcgctaccgtgaaaaccgtccgggctacccggcgattgctatttctgacgttagtcatatttcctgcgtcggtaatgatttcggtttcaatgatattttctcccgctacgttgaagcggtaggtcgcgaaggcgatgtactgctggggatctccacctccggtaactctgcaaacgtgatcaaagcgatcgcagcggcgcgtgagaagggaatgaaagtgatcaccctgaccggtaaagacggcggcaaaatggctggcacggcggatatcgaaattcgcgtaccgcactttggttatgccgaccgcattcaggagattcacattaaagtgatccatatcctgatccagttgattgaaaaagagatggttaagtaagtctggcgtaggccggataagacgtttacgccgcatccggcatttgtgcgctgatgcctgatgcgacgctgacgcgtcttatcatgcctacaaatctgtacgcgaaccgtaggccgaataatgcgttcacgccgcatccgacctgaaaattcttaaatcaatcttcgccgggggccatgcgctcccgctgttgtggaggttacccatgtgcgaattgctcgggatgagcgccaacgtccctaccgatatctgctttagtttcaccgggcttgtacagcgtggtggtggaaccgggccacataaagatggctggggcattaccttttacgaaggtaaaggctgtcgcacatttaaagatccacaacccagctttaattcccccatcgccaaacttgtccaggactacccgataaaatcctgttcggtggtggctcatattcgccaggctaatcggggcgaggtggcgctggaaaatactcacccatttacccgcgagttatgggggcgtaactggacttatgcccataacggacaactgacgggctacaaatcactggaaaccggcaacttccgcccggtaggcgaaaccgacagcgaaaaagccttctgctggctcctgcataaattaacgcagcgttacccgcgcacaccgggcaacatggcggcggtatttaaatatatcgcctcactggcggatgaactgcggcagaagggcgttttcaacatgctgctttcggacgggcgctatgtaatggcgtattgctcgactaatttacactggatcacccgccgcgcgccgtttggcgtggcaacgttgctggatcaggatgtggaaatcgacttcagctcgcagaccacaccgaatgatgtggtcacggtgattgcaacacagccgctgacgggcaatgaaacctggcaaaagattatgccaggcgaatggcgcttattttgcctcggggtgcgtgtagtttgatgccagttgtggctgcacaacttcgtggcttaacggcttgctgaccacgtaacgaccattgaccacagaaacggttggtggcttacgggtttgctcaaagtagtcgtaacccggcttcagttgctcccagaagtccttaaagttggaatatttatggcgcttcatattggcgtcggtcatgcggaacgggtaaatactcacttgcacgctcggctgaccaaacaccagcgcaccagtaacgaactggaatatctcatcaataccctgattggtcattgcgtagcagccgatggaaacacaatcgccgtggatcatcaggtatttcccttcataaccatgcgcacggtcataggcattggggaaaccaatattaatcgctttgtagtaacggctgtctggttttaactgattacgctggacgctataaaacccttccgggcttttgaaatcgccctgacgctgttttggccctaagccgccggaatatttacagattttatagctgtcgagcagttgatattgctcgcccattttgacgtagagatcgagcgtacgttcttccttgaagatctggatgtagacaggggatcccatcaactgctgcttatactctttgctcacaggcgtggtagagctactgctgcccagcaaaccggcaaatgaaacgcacgggatcaacaacatcgcaagaattaatgcgattttacgcatactgcttattccttgataaaacggttacacacgccaggacggcaaaatggatcccaaatcggaatagtctggatttggaaggctcacattatcaccaaaagagttttacgcaagcctgtcggcgcagggtttacaaatttcatcggaagcgggctttacccaaagagcgccgcgtgagttccagttctctcaaatcgtaaaagtttatcggtaagtttgtaaatcaggatccagtccggttcgacatgagcatcgcgataacctttccatgaaccttgcagcgggtggtctttataaacagctggaagcggtaaagtattattgataagaagcgtcataagatatttcaatttattcatatccttatgacgcttttgtgcaagttttacatcctttgaatattgtcccgagtattcaatatccctttgaatcatatttaaattcctaatttatcaaataaatcatcggcgtctttggccttatgaacatcaatgccagcttcgctgtttttgattgattgaatggttaattgattaggctcgcgtaaatcaaacggcaatgccttttcacgcgcgacctttgtgagggttatgcgaaccaggtcagagatggtcagccccatcccggccagtacgtccgctgcctgattcttcagatcttcatcgattcgggcgcgaacaaacgcgttagcagccattggggtatctcctgtgctgtatatttattcagcttgaattgtagctcaaatgagcaacagcgacaatccatgagtaatttaataaacggatgtttttacataattaactgaaatatatatgttaattttataataatggtttattaagtttgttcagaaacgatccgggatacactgcaacattaaagcatgaccagccattattgagtatgtccttgccgtcgattccatcctttgtattgtcgggattactgttgatttgtttgccgttttcttcatttgccagcgccaccacatcacatatctctttcagctacgccgcccgccagcggatgcaaaaccgtgcgcgtttattaaaacagtaccaaactcatctgaaaaagcaggccagctatattgtggaaggcaatgccgaaagcaaaagggcgctacgccagcacaaccgggagcagataaaacagcatccagaatggtttcctgctccgctcaaggcgagtgacagacgctggcaggcgctggcggaaaacaaccactttttaagcagcgaccatctgcataacattaccgaagtggcgattcaccgcctggagcagcagcttggcaagccttacgtctggggcggtacgcggcctgataaaggctttgactgtagcgggttggttttttatgcctacaacaagatccttgaggctaagctcccgcgcacggccaatgagatgtaccactatcgccgggcaacgattgtggcgaacaacgacctgcgccggggagatttgctgtttttccatatcctcagccgcgagatagccgatcatatgggcgtgtatttgggcgatgggcaatttatcgagtcgccacgtaccggcgaaaccattcggataagccgattagccgaacctttctggcaggaccattttttgggcgcgcgcaggattttgacggaagagacgattttgtaggacggataaggcgtttacgccgcatccggcagttgtacgcaggtgcctgatgcgacgctggcgcgtcttatcatgcctacgagcccgcgaatatttgcgagccgctttcccgatataaaacaacctcattgccaacctttccttttcttcttaccgttgagaaaaaggagtcgccatgtctgaatatcgtcgttattacatcaaggggggaacatggtttttcacggtgaatttacgaaatcgtcgaagccaacttttgaccccccagtaccagatgctccgtcacgccattattaaagttaagcgagacaggccttttgaaatcaacgcctgggtcgttttgccagagcatatgcactgtatctggacattacctgaaggcgatgatgatttttcctcgcgctggcgggaaattaaaaagcaatttacccatgcttgtggattgaaaaatatctggcaaccacgtttttgggagcacgccatccgcaataccaaagattataggcatcatgttgattatatttatataaatccagtaaagcatggttgggtaaagcaagtgagtgattggccattctcaacgttccatcgcgatgtcgcgcgagggttatatcccatcgattgggcgggggacgtaacggattttagtgccggggagcgtatcatttcataattgtgcgcagatgcctgatgcgacgctagcgcgtcttatcatgcctacaaacttgtgccggatcggtaggccggataaggcgtttatgccgcatccggcagttatgcgcagatgcctgatgcgacgctggcgcgtcttatcatgcctacaaacttgtgcctgaacggtaggacggataaggcgttcacgccgcatccggcagttgtgcaccaatgctggatacttacatcaacgcccccataatcttcaactccagctcatccggcacttcgttatacgacagcacatgcagccccggcgcaaacaaccttgcataacgcgccagcaaagggcgcagctgcggtggcaccagcagcaccgggtctttccccgccgctttcatctgctctttcacctgtggcatcgtactctggaactggttgagcatattcggatcgaccggcacgctgtcgagcatcactttcccgccctgttgcgcctgattcaccacgttggtcagcagattttccagctcattattcagcgtatacaccgtcagctcctgcttgcgaacgaacggatgggtaatgctgcgccgcaatgccaggcgcacatcggccgccagcagaatatgatctttcgtcaccgtgctactggcgaccagcacggtggcgatggtgacgatatcgcgcagggaaacgccttcggtcagcagcgcccggtacactttcagcaactggctgtaattgagcgccgcgctcaaatcttccgccagacgcggtgccgtcgacgataaacggttatgcaactgcgtaatatcatcatagttaaacaaatcaggaatatagctgcgcacaatcttatttacatgggtagcgatcacgctggcgctgtcgatcacctgataccccatattcagcgccttcgctttctgcgccgcctggatccaggtgaccggcatcccgtacgccgggtcgttcccctgcacgccgtcaatctcgccgtaggtttcgctggagggcagggccatcagtttatccgccggaatatccgcttcatcagcctttatgccgttgatgaaaatggcgtactgactgggcttaaggcggaagttttcccgaatgcggatctccggcagcagcacgccgttgccgtcagaaatcacctgccgcacgccgcgaatccgctgggtgagcgggttaccctgtgctttgtccaccagcgccaccagtttgtaaccgaggcttaaactgataggctcgatcagcggaatggtttcccaactgacctgctgctcgctggtttcggtgatggtgcgggtcagcgtttcgaggcttttctcttccgcctccgccgccagcggctgtttgctcatccgccagccggtaaaaccaagcagggcgctgaacagcaaaaacggcaggtgcggcattcccggtaccaccgccagcacgaacataatcccggtggcggtgtagagcaccgacgggcttgccagcagctggttacgcacgtcatgggcgatatcgccgttgtcgctgacgcgggtgacgataatcgccgccgcggtggagagcagcagggaagggatctgcgccaccaggccgtcgccgatggtcatcagcacatactgctggaaggcagcatcggcgctcaggttgtatttgaagatcccgatacagacgccgccgatcaggttgatcgccagaatcatcatcccggcgatggcgtccccgcgcacaaacttcgatgccccgtccatcgcgccgtagaaatcggcctcgctggcaacatctttacgccgggtttgcgcctgcgcctggttgatcaatccggcgttaagatcggcgtcaatcgccatctgtttgccgggcatcgcgtctaaggtaaagcgggcagaaacctcggaaatacgctcggcccctttggtgacgacaataaagttgattgtcaacagcgtcagtaaatccgagcgtgaaagcattatcgccgcgctgcacgggcagtcgatttttaacggtggtgggctgtcgccgttaaataaaatcagcccgtctcatccgccaaaacctgccaccgtggcggtgccggaagagacggagaaaaaagcgcgtgatgtgaatgagaaaacggcgctgctgaagaagaaatccgccaccgagcttggtgagctggcaaccagtatcaacaccattgcccgtgatgcgcatatggaagcgaatctggagatggagattgttccccagggattacgcgtgctgattaaagacgaccagaaccgcaatatgtttgaacgcggcagcgcgaagattatgccgttctttaaaacgctgctggtggagctcgcgccagtgttcgactcgctcgataataaaattattattaccgggcataccgatgcgatggcctacaaaaacaatatctacaacaactggaacctttcgggtgaccgcgcgctttcggctcgtcgggtgctggaagaggccggaatgccggaagataaagtgatgcaggtaagcgcaatggcggaccagatgctgctggattccaaaaatccgcaaagcgcgggcaaccggcgcattgagattatggtgctgaccaaaagtgcgtccgatacgctgtatcaatactttggtcagcatggggataaagtggtgcagccgctggtgcaaaagctggataagcagcaggtgctttcgcagcgaacgcgttaaatgctgaatctttacgcatttctcaaaccctgaaatcactgtatactttaccagtgttgagaggtgagcaatgcgtaaaatcattcatgtggatatggactgctttttcgccgcagtggagatgcgcgacaatcccgccctgcgcgatatccctattgctattggcggcagccgcgaacgtcggggggtgatcagcaccgccaattatcccgcgcgtaaatttggcgtacgtagcgctatgccgacagggatggcgctcaaattatgcccacatctcaccttgcttccggggcgctttgacgcctacaaagaagcctcaaatcatatccgtgaaatcttctcgcgctacacctcgcgcattgaaccgttgtcactggatgaggcttatctcgatgtcaccgatagcgtccattgccacggttctgcgaccctcatcgcccaggaaatccgccagacaatcttcaacgagctgcaactgacggcgtctgcgggcgtggcaccagtaaagtttctcgccaaaatcgcctccgacatgaataaacccaacggccagtttgtgattacgccggcagaagttccggcatttttacaaaccttaccgctggcaaaaatccccggcgtcggcaaagtctcagcggcaaaactggaagcgatggggctgcggacctgcggtgatgtacaaaagtgtgatctggtgatgctgcttaaacgctttggcaaaatttggccgcattttgtgggagcgtagtcaggggattgacgaacgcgatgttaacagcgaacggttgcgaaaatccgtcggcgtggaacgcacgatggcggaagatattcatcactggtctgaatgtgaagcgattatcgagcggctgtatccggaacttgaacgccgtctggcaaaggtaaaacctgatttactgattgctcgccagggggtgaaattaaagttcgacgattttcagcaaaccacccaggagcacgtctggccgcggctgaataaagctgatctaatcgccaccgcgcgtaaaacctgggatgaacgccgcggcgggcgcggtgtgcgtctggtggggctgcatgtgacgttgcttgacccgcaaatggaaagacaactggtgctgggattatgatgtatactattatgtatattctggtgtgcattattatgagggtatcactgtatgcatcgaattctcgctgaaaaatcggtcaatatcactgagttacgtaaaaacccagctaaatactttattgatcaaccggttgcggttctttctaataatcgccccgcaggatatctcttaagtgccagcgcattcgaagcgttaatggacatgcttgctgaacaagaggagaaaaagcccataaaggcgcgcttccgtccaagtgctgcaagattagaggaaattacacgccgcgctgaacaatatcttaatgatatgacggatgatgatttcaatgactttaaggaataaggatgcgggtattcaaaacaaaacttattcgcctgcaacttacagcagaggaacttgatgcgttaacggcggattttatttcctataagcgtgacggtgttttgccagatatatttggtcgcgatgcactctacgacgactcctttacctggccattaatcaaatttgagcgagttgctcatattcatctggcaaatgagaataatccatttccgccacagttgcgccaattcagcagaacgaatgacgaagcgcatttggtatattgtcagggggcgtttgatgagcaagcatggttgctcattgccattctgaaacctgaacctcataaactggctcgagataacaaccaaatgcataaaattgggaaaatggcagaagcgtttcgcatgcgtttttgaatttatattatgaataacatacaaataagaaactatcagcctggcgattttcagcaactatgcgctattttcattagagcggttacgatgaccgccagtcagcattattcaccacaacaaatttccgcctgggcgcagattgacgaatctcgctggaaggagaaactcgcgaaatcacaagtgtgggttgcgatcattaatgcacaaccggttggttttatttcccgcattgaacattatatcgatatgttatttgttgaccctgaatacacccgccgtggggttgccagcgctttgttaaaacctttgattaagtctgaatccgaacttacggtggacgcaagcataaccgcaaaacccttttttgaacgttatggttttcagacagttaagcagcagcgcgttgaatgccggggagcgtggtttactaatttttatatgcgatataaaccgcaacattaaatccagcttgcaatgaaaataacgcccgcctggtatgtgcgcgttttctgattccacaaactgcaaggaggtaaatcatgacaaatcctttatcaatgactctttgcagacctttccaggattaattctttttttcttgccctggattcgtctgccatttcctgatttttatatttatatactctaaataattcgagttgcaggaaggcgacaagcgagtgaatcgccaggagcttacataagtaagtgactggggtgaacgaacgcagtcgcagtacatgcaacttgaagtatgacgagtataaatggaatggtacatgggcaaatatattcgtcccttatccgatgcggtatttaccatcgcatctgatgacctgtggatcgagagtttagcgatccaacaattacacaccacggcaaatttacccaacatgcagcgcgtagtggggatgccagatttacaccccggacgcggctacccgattggcgcagcgttcttctctgttggtcgtttttacccggcaagacgtcgcggtaacggtgctggaaacagaaacgggccgctactctgacacactgcgttcggcgctggtttctctcgatggcgataacgcatgggcattaagcgaaagctggtgtggcactattcagtggatttgtccgagtccgtatcggcctcatcatgggcgcaaaaactggtttctgggcattgggcgttttaccgctgatgagcaggaacaatcggatgcaatccgttatgagacgctgcgttcgtcggggccgggcggtcaacatgtcaataaaaccgactcggcggtacgcgccacgcatttggcatccggtattagcgtgaaggttcagtcagagcgtagtcagcatgctaacaagcggctggcacgattgctgattgcctggaagctggagcaacagcaacaggaaaatagcgcggcgctgaaatcgcagcggcgaatgttccatcaccagattgaacgtggcaacccgcgacggacatttacagggatggcttttatcgaaggataatgaaggatgaaactgccggaaggcgattaaacgccatccggcagcaaatcaaataattacttcgccggaatttctttcagcagttcagtcagcagtgtccagtaatgacctacgctttcgatgtgaacttgctcatccggagagtgtggaccggtgatagttggcccgatagaaaccatgtccatttccggatacggttttttgaacagaccacattccaggcccgcgtggataatctggatgttcggcgtcttgttgaacaggcgctgataggtttcacgtaccagatgcatcaccggagaattagcgtccggctgccagccaggatatgcgcctttcgcttcggttttcgcgccagccagtttacccagcgaatccagcatgctcaccacgtagtctttaccgctgtcgatcagtgaacggatcaggcagtgaatttctacgttattgtcagtcatggtcaccacaccgacgttcagggaggtttcaaccacacctttggctacatcggagttacgaatcacaccgttcggggtggcgttcagcagacgaataaaggtatcgcgagatttcgcaatcagggcagctttatcgttcgctacagagtccagcaacaaggccagatttttctctttttctgccagctcgtttttcaggatctcctgataggtattcaccagagatttcaggacgtcgactttatcagctgcgacagcaatggtcgcaaaggcttcacgcgggatggcgttacgcagtgtgccgccgttgaaatcgataaggcgcagatccagttcttccgcatgacccgccaggaagcgcaccagcagtttgttggcattacccagcccaacgtggatttccccgccggagtgaccgcctttcagaccttttaaggttaacttgaaggtttcaaaaccagctggaaccgcttcacgatctaaatgcaggttggaggtgaagtcgataccccccgcacaacccatgtagatttcaccttcttcttcggagtcggtgttaatcagaatatcagccagcaaccagttgccctgtaagccgaacgcaccgtccataccggcttcttcggtcatggtcagcagcacttccagcgggccgtgaaccacgttttcgtcagccagaaccgccagcgcagaggccataccaatgccgttatccgcacccagcgtggtgccgcgcgctttaacccattcgccatcaatataaggctggataggatctttcgtgaagtcatgcacggtgtcgttatttttctgcggcaccatatcgaggtgggcctgtaagacgaccggtttacgattttccatacctgcggtagcaggtttacgaatcaggatattacctacctgatcgcgttcgacatggaaacctttctcttttgcccaaccaacaatgtattcagcgagttgctcttcatgataggacgggtgaggaatagaacagattttggcaaaaatatcccacagcggctgtggagataattgagacagttcagacacgttaagtctccttgtcgatcacccgcaaaacagtattgcaggtcacagggttagcagaaaatgttgtcaacacaagacaggcttgcgagatatgtttgagaataccactttatcccgcgtcagggagaggcagtgcgtaaaaagacgcggactcatgtgaaatactggtttttagtgcgccagatctctataatctcgcgcaacctattttcccctcgaacactttttaagccgtagataaacaggctgggacacttcacatgagcgaaaaatacatcgtcacctgggacatgttgcagatccatgcacgtaaactcgcaagccgactgatgccttctgaacaatggaaaggcattattgccgtaagccgtggcggtctggtaccgggtgcgttactggcgcgtgaactgggtattcgtcatgtcgataccgtttgtatttccagctacgatcacgacaaccagcgcgagcttaaagtgctgaaacgcgcagaaggcgatggcgaaggcttcatcgttattgatgacctggtggataccggtggtactgcggttgcgattcgtgaaatgtatccaaaagcgcactttgtcaccatcttcgcaaaaccggctggtcgtccgctggttgatgactatgttgttgatatcccgcaagatacctggattgaacagccgtgggatatgggcgtcgtattcgtcccgccaatctccggtcgctaatcttttcaacgcctggcactgccgggcgttgttctttttaacttcaggcgggttacaatagtttccagtaagtattctggaggctgcatccatgacacaggcaaacctgagcgaaaccctgttcaaaccccgctttaaacatcctgaaacctcgacgctagtccgccgctttaatcacggcgcacaaccgcctgtgcagtcggcccttgatggtaaaaccatccctcactggtatcgcatgattaaccgtctgatgtggatctggcgcggcattgacccacgcgaaatcctcgacgtccaggcacgtattgtgatgagcgatgccgaacgtaccgacgatgatttatacgatacggtgattggctaccgtggcggcaactggatttatgagtgggccacccaggcgatggtgtggcaacaaaaagcctgtgcggaagacgatccgcaactcagtggtcgtcactggctgcatgcggctacgttgtacaacattgccgcctatcctcatctgaaaggagatgacctggccgagcaagcgcaggctttgtcaaaccgcgcctatgaagaggccgctcagcgtctaccgggcacgatgcggcagatggagtttaccgtacccggcggtgcgcccatcaccggctttttgcatatgccgaaaggcgatggcccgttcccgacggtattaatgtgtggtggtctggatgcgatgcagacggactattacagcctgtatgaacgttattttgcgccgcgcggcattgcgatgctgactattgatatgccgtcggtgggcttttcttcaaaatggaagctcacccaggactccagcctgttgcatcagcacgtcttaaaggcgctgcctaacgtaccgtgggtggatcacactcgcgtcgcggcctttggtttccgtttcggcgctaacgttgccgtgcgtctggcataccttgaatcgccgcgtctgaaagcggttgcctgtcttggtccggtagttcataccctgttgagtgattttaagtgccagcaacaggtgccggaaatgtatcttgacgttctggccagtcgtttggggatgcatgatgcttccgatgaagcgttgcgcgtggagctgaatcgctattcattaaaagtgcaaggattgctgggacgtcgctgcccaacgccaatgttatcaggctactggaagaacgatccgttcagcccggaagaggactcacgcttaatcacctcatcatctgctgacggtaaattattagagatcccatttaacccggtgtatcggaattttgacaaaggtcttcaggaaatcaccgactggatcgaaaaacgcttgtgttaaaaatttgctaaattttgccaatttggtaaaacagttgcatcacaacaggagatagcaatgacgttaccgagtggacacccgaagagcagattgatcaaaaaatttaccgcactaggcccgtatattcgtgaaggtaagtgcgaagataatcgattctttttcgattgtctggctgtatgcgtcaacgtgaaaccggcaccggaagtgcgtgaattctggggttggtggatggagctggaagcgcaggaatcccgttttacctacagttaccagtttggtctgttcgataaagcaggcgactggaagagtgttccggtaaaagacactgaagtggttgaacgactggagcacaccctgcgtgagtttcacgagaagctgcgtgaactgctgacgacgctgaatctgaagctggaaccggcggatgattttcgtgacgagccggtgaagttaacggcgtgagtgaaatgtgccggatgcatcacatccggcaatattcattaaaactgatacgtcatgccaaccgcgacaatatcatcattattaatattcaatttgttatcgctatccagttggttgattttataatcaacaaacgctgacatatttttgttgaaataatacgtagcaccgacgtcgatataattgaccagatcttcatcaccgataccttcaatatctttccctttcgataagacataacccagcgatggacgcagaccaaagtcaaactggtattgagcgaccgcttcaaagttctgtgtcttattggcaaagccgccagttattggcgtcattttgcgtgtttcagaatagaaagttgccagataaatattattggcatcgtatttcagacctgttgcccatgcttctgcacgcttgcctgtgccacggctttgcaggttctgctcgttggtgcgatctgagttggtataggccccactaatggcgaaatcgctgccgccaaagtcatatgtcaatgacgtgccgaagccatcgccgttttgctttttaacgtcgcggttttcgtttttcccttgatattgcagggttaagttcaggccatcgataacgccgaagaagtcggtgttccgatacgtcgccagaccgctggcgcgtttggtcataaagttgtcggtctgcgccgaggaatcgccaccaaattccgggaacatatcggtccaggcttccacgtcatacaacgcccccaggttacgaccataatcgaaagaacccaaatctttatatttcaacccggcaaaagcgagacgcgttttttgctgtgcagtatcactctctgctttattaccggcaaactctgcttcccaacgaccataaccagtcagttgatcgttaatttgtgtttcgcctttaaaaccaaaacggatataactctggtcgccatctttactggcgttatcactcatataatgcatggctttaactttgccatagacatccagtttattaccgtctttattatatatttctgcagcctgtacagatgcagatgccacaatgcccatcaccactaatgccagagtgctctttttcattttcattcctgattttaattaacgcgcgaatattcagcgggagagtcccgttgaaaacaggaaagtttttaacctgagattgttaaagatatattacagattaataatattcttaaaatgtggtaatttattaaatctgtaataaaagcgtaaacaactgccgctaggcttgctgatcccgcgcaacaaaacgccatgctttgctcgcagatggttggcaaccgacgacagtcctgctaaaacgttcgtttgatatcatttttcctaaaattgaatggcagagaatcatgagtgacagccagacgctggtggtaaaactcggcaccagtgtgctaacaggcggatcgcgccgtctgaaccgtgcccatatcgttgaacttgttcgccagtgcgcgcagttacatgccgccgggcatcggattgttattgtgacgtcgggcgcgatcgccgccggacgtgagcatctgggttacccggaactgccagcgaccatcgcctcgaaacaactgctggcggcggtagggcagagtcgactgattcaactgtgggaacagctgttttcgatttatggcattcacgtcgggcaaatgctgctgacccgtgctgatatggaagaccgtgaacgcttcctgaacgcccgcgacaccctgcgagcgttgctcgataacaatatcgttccggtaatcaatgagaacgatgctgtcgctacggcagagattaaggtcggcgataacgataacctttctgcgctggcggcgattcttgcgggtgccgataaactgttgctgctgaccgatcaaaaaggtttgtataccgctgacccgcgcagcaatccgcaggcagaactgattaaagatgtttacggcattgatgacgcactgcgcgcgattgccggtgacagcgtttcaggcctcggaactggcggcatgagtaccaaattgcaggccgctgacgtggcttgccgtgcgggtatcgacaccattattgccgcgggcagcaagccgggcgttattggtgatgtgatggaaggcatttccgtcggtacgctgttccatgcccaggctactccgcttgaaaaccgtaaacgctggattttcggtgcgccgccggcgggtgaaatcacggtagatgaaggggcaactgccgccattctggaacgcggcagctccctgttgccgaaaggcattaaaagcgtgactggcaatttctcgcgtggtgaagtcatccgcatttgcaacctcgaaggccgcgatatcgcccacggcgtcagtcgttacaacagcgatgcattacgccgtattgccggacaccactcgcaagaaattgatgcaatactgggatatgaatacggcccggttgccgttcaccgtgatgacatgattacccgttaaggagcaggctgatgctggaacaaatgggcattgccgcgaagcaagcctcgtataaattagcgcaactctccagccgcgaaaaaaatcgcgtgctggaaaaaatcgccgatgaactggaagcacaaagcgaaatcatcctcaacgctaacgcccaggatgttgctgacgcgcgagccaatggccttagcgaagcgatgcttgaccgtctggcactgacgcccgcacggctgaaaggcattgccgacgatgtacgtcaggtgtgcaacctcgccgatccggtggggcaggtaatcgatggcggcgtactggacagcggcctgcgtcttgagcgtcgtcgcgtaccgctgggggttattggcgtgatttatgaagcgcgcccgaacgtgacggttgatgtcgcttcgctgtgcctgaaaaccggtaatgcggtgatcctgcgcggtggcaaagaaacgtgtcgcactaacgctgcaacggtggcggtgattcaggacgccctgaaatcctgcggcttaccggcgggtgccgtgcaggcgattgataatcctgaccgtgcgctggtcagtgaaatgctgcgtatggataaatacatcgacatgctgatcccgcgtggtggcgctggtttgcataaactgtgccgtgaacagtcgacaatcccggtgatcacaggtggtataggcgtatgccatatttacgttgatgaaagtgtagagatcgctgaagcattaaaagtgatcgtcaacgcgaaaactcagcgtccgagcacatgtaatacggttgaaacgttgctggtgaataaaaacatcgccgatagcttcctgcccgcattaagcaaacaaatggcggaaagcggcgtgacattacacgcagatgcagctgcactggcgcagttgcaggcaggccctgcgaaggtggttgctgttaaagccgaagagtatgacgatgagtttctgtcattagatttgaacgtcaaaatcgtcagcgatcttgacgatgccatcgcccatattcgtgaacacggcacacaacactccgatgcgatcctgacccgcgatatgcgcaacgcccagcgttttgttaacgaagtggattcgtccgctgtttacgttaacgcctctacgcgttttaccgacggcggccagtttggtctgggtgcggaagtggcggtaagcacacaaaaactccacgcgcgtggcccaatggggctggaagcactgaccacttacaagtggatcggcattggtgattacaccattcgtgcgtaaataaaaccgggtgatgcaaaagtagccatttgattcacaaggccattgacgcatcgcccggttagttttaaccttgtccaccgtgattcacgttcgtgaacatgtcctttcagggccgatatagctcagttggtagagcagcgcattcgtaatgcgaaggtcgtaggttcgactcctattatcggcaccattaaaatcaaagagttaccccatatttaaatacaccacgtttcctcctgtgccgtatttgtgccattgtaaccttggcaattcatcaaaatactgttctgacatcaggcagtgcaggtgcagacatttaagccaattgctgccgccattctttgacgtagtcaatcagggcgcggagctttggtgcaatattgcgacgctgtgggaaatacagatagaagcccggaaattgtggaagaaagtcatcaagcagcgatacaagcttaccgctttcaatatatggcctgaaagtttcctgagtggcaattgttattcctccgccggcaagagccagcctcaacatcagacgcagatcattagtcgtaatctgcggttcaatcgcaaggtcgaaagttctcccgttttcttcaaatggccagcgataaggcgcaacctccggggactgacgccagccgatacacttatgggtatttcccccggaggcgagaaagcgctctccacgcccggccgcaaggatcaggacgacgggggcaggcatgaatcctcctcctgatggagacgtacagaggcgacttctgccagcacggagagtgccagagtatgcgcatcccgggctttggggaatatcccgacgggtgcccggatttgcgttgtttcctccctggaccatcccagctcgtggagcttttgcagacgtaacgtgtgggttcgatagctgcccaatgcgccgagataaaagggttttgcttctcgcgcggcctgcaacactggcagctcccggttgagatcatggcacagcaaaatgaccgccgtatcggtatcgatctgagcgctggctgaggccggaaaaagatcgaagatatggctgtcatagcctgtggctgctgcaagactcgcggttgcctgcgcctcaagagaacgtccgtaaatcatcagcctgacgcatggcctgaaccccacctcaaagccattgagattccagcccgtccgggtttgcgtgggcaggcacaccagcgattgtgcttgcggatcgtagcgcagccccaccggttttctctgttccaggcggttcagcacggcgagcagaggctgtgccgagcgtagtttatggagcgtcagcgtgatcccaccgccgcagggcagaacgatgtcaaaccacggcgaaccttcgccatagcgaatttcgcgatcgcggcctgagcccatcatctccagcgcttcaaaagcggcagcggcctccacgcagccgccagagacaaaaccgcagtaacgaccatcttcgcgcaccaccatctgcgccccgagcgggcgcgccgcgccgccgcgtatctccaccagcgtcaccagcaccgctcctttaccggacattagcgcctctacggcgaagcgcagaatggtccggtggtcatcggtgagaaacgcctgctctggcttatgccagtgttcgtctttgtcaaaaagcgggtatgacattgttcctccttaaaccacatccggcagcttatcgagcagcttatccagagtgatgggataatcccgtacccgaataccggtggcgttatacaccgcgttggcgatagccgcgctcacgccgcacaggcccagctcaccgacacctttggccttcatcggggaggatatggggtcggtatcatccaggaaaatcacctcctgttttgggatatccgcatgaaccggcacctcataccccgccatatcgtgattaacgaagtagcccaaacggtcatccaccgccagctcctccatcagtgccgcgcccatgcccatagtcattgcgccaatgacctggctgcgcgcagttttcggattcaggatgcgtcctgcagcacacacagcgagcatacgccggacccgaacttctcccgtcgcgctatgcacgccgacctccacaaaatgcccggcaaaggtcgactgctggtactctttgctcagtgttccgaattcaatgctctcttccgctgtcagtctgccgcctgcggtggcttcatgtagcgtggcgcttcgggtaccgttggtaatcttgccgtcggcaaactgcgactgctcaggatcaaacccgactgccgaggcaatcatttcgcgaagcttcatacaggcggcgtaaacgccggaggtggaggtattcgcgccccattgtccaccagaacccgcagaaaccgggaaactggaatcgccgaggtgaaccgcaacctgctccagcggtacgccaagcatttccgctgccgtctgggccagaatggtgtagctgccggtgccaatgtcggtcatgtccgtttctacggtaacggtgccgttttgttcgaggtgaacccgagcacccgatttttccagcagattattgcgaaagcccgccgcaacaccgtggccgactagccactccccgtcgcgcacctgtccgggtgtggcgttgcgctgcttccagccaaatttatccgctccggtgcgcaagcactcgataagctgacggcgagagaagcagcgcgtcgggtcggcggggtcaacctgagtgtcattcaggatgcgaaactcgacgggatcgatgcccgctttttccgccagttcgtcgatcgcgatttcgagcgccatcagaccgggggcttcgccgggcgcacgcatggcgttcccttccggcaaatcaagcgtggcgagccgcaggccggtatgacgattcgccccggcgtagagtaattcgctttgctgtaccgccgtttccggcgtgccgccgggcaggtttccagaccagctttcatgtgagatagcggtgattttcccgctctggtcggcaccgatacgcaagtgctgaagggtggcggggcggtgcgtggtgttattgggaatagaggggcgggggagcatcactttaaccggacgtttcaccgctcgggcggcgagggccgccagcagcgcatcgcttctcaggaacagcttgccgccaaaccctccgccgatatacggggagataatacgcacattctccacgggaactttcagcgtttttgccagatcggtgcggcaccagtcaatcatctgatttgaggtccagagggtaagcttatttccatcccagacggccatcgaggcatgcggctccatcgccatatggctctggtccggggtcgtgtaggtagcatcaatcttcaccgcagcggaggtgaaagccccgtcaaagtcaccgacgtttttgtcgggcgtgtcttccggcggctgattgacggcctgtttttcgtccgccagggagtaagctcctttattacggcgatagtgtgcctgcaccagcgaggccgccgctcgcgcctgttcgaaggtctcggccactaccagcgcaatggcctgatgatagtgctcaatagtggggccgcctaacagcctggcggtgtttttgtcgcctttgccgagtgccccggcgttactggcggtaatgacagccagtacgcccggcgctttttgcgcggcgtccgtatcaagggcggtgaggcgtcctttggcaatggcggaaccgacgatatagccataggcggcgttgggggcttcttcatgccattcgtaggcgtagcgtgccgtgccggtagttttcagcggtccgtcgatgcggtcatggggacgaccgacaaccttcagctgatcgatcgggttttcccctgcgggtttatcaaatttcatgcctgtgccctcgcttcagccagtacggaggcaagcgttcgcttcgccaacaggagtttaaaggtgttttcagcggtgggatgggcgctggcgaacagcgtgtcatatacggcctgcgccccctgggatagctgagcatccgcagcctcaatgcgccagggcttatgtgctactccgcccagcgcgacgcgcccgctgccgtcaggctgaataatcgccgcgaccgataccagggcaaaggcgtaggaggcgcgatcgcgcaccttacggtagatatgttttccgccgagcggtggaggtaacgtcaccgcaacgataagctcaccgggaagcagggcggtttcaatgtgcggcgtttttcccggagggtgataaaaatcagccagtgtgatactgcgagtctttccctccggcgtgatggtttccaccaccgcatccagcaaccgcattgcgaccgccatatcgctcggatgggtggcaatgcaggcttcgcttacgcctaccaccgcgtgctgacggctaaagccttcaagcgccgcgcagccgctcccgggcaggcgcttattgcagggctgattggtgtcgtaaaaataggggcagcgcgtgcgctggagcagattacctgcggtggttgcctgattacgtaactgaccagacgcgccagcgagcagggcgcgggagagtaccgcgtaatcacgacgcacgcgctcgtgagccgccaggtcggtgttccgtaccagtgcgccgatgcgcagcccacccgcgtcggtcacttcaatcttatcgagcccgaggccgttcacatcgataaggtgggtgggcgtttcaatttccagcttcatcaggtccagcagattggtcccgcccgcgataaattttgcgccgggtacgcgctgagcgctaagtgccgcctcggctggggtattcactcgttcataggtaaacgccttcatgattttatctcccccgcagcatcttcaatggcggcaaggatgttagcgtatgcaccacagcgacagatgttgccgctcatacgttcacggatctcatcggcagttgtttctggagcggaaaccaaatcgaccgtgacgtgactgggaatgccgtcctgaatctcttttagcaccgctactgatgagcaaatttgcccggaggtgcagtagccgcactggaagccatcatgcttgataaaggccgcctgcatggggtgaagattatctggcgaacccaggccttcaatggtggtgatctcggccccctgatgcatgactgcaagcgtcaggcaggcattaagcctgcgaccattgaccagcacggtacaggctccgcactgtccgtgatcgcaacctttcttggtaccgatcaaatgcagattttcacgcaaagtgtccagtagcgtggttcgggtatccacctcaagctgctcggttttgccgttcaccttcagtgtcaggggcattatctctggcgcgggtgtagctgccggaacgcttgccgccagcgtagaatgaggataaaccacggcggtcgccgctgttgcggcgctcactttaatcagatcgcgacgggtcaaacttaaatcgtgcggctcgtgcttcccaacccgattatcttcggggtattcgccttggttgctcataccaggcctccggtattctaaaggggaaaataagagtgcgttgcgagagtgctgatgcttttttaaacgttaagcatagtcggcgacagcaggaggattattcttaaaacgcgaatgcagctatgagcccggctaataaattcatgttcgccgggatgttgatgatgatgggagctggtttattgctttagttgtacgatgcaaaaaccaataaggaaacctgtgattttcagctctacatcaccctgcaaatctctgtcacttctaatataaaaatagggagaaatgatggagcttatattcattggcgattaggaaactatcttgttatacaaaacaatacagttctttacatttgccttgttttatgaatactcctgaagaggtgtataacataatggtacaagcagggtagatatgaatatatttgaacaaactccaccgaaccgcagacgttatggtcttgctgcattcattgggctgattgctggcgttgtttccgcattcgtgaagtggggggctgaagttccattgccgccacgtagcccggtggatatgtttaatgcagcgtgtggcccggaatcattaatcagggctgcaggccaaattgattgctcgcgtaattttctcaatccaccgtatatttttcttcgagactggttggggctgacagatcccaatgcggctgtttatacctttgccgggcatgtctttaactgggttggtgttacgcacattatcttttcgatagtgtttgctgtcggttattgtgtggtcgctgaagtatttccaaaaattaaactctggcagggcttactggcaggtgctttagcccaactttttgttcatatgatttcattccctctcatgggactgacgccacctctgtttgatctcccgtggtatgagaatgtttctgaaatttttggacatttagtctggttctggtctattgaaattattcgcagagatttacgaaacagaattactcatgagccagaccctgagatccctttaggctcaaacagataatgcattgaatgataaaaatggcgcaaatacagcgccatttttataggttaaaaacattgctttttatattctgatgcagatagtcagtgagtatatcgcgctacttcaggatgatgtagatccgaagaacgctacagaagagaggcattgttgctggcaaatagaagaagtatcgggttttgttacccctgaaaaacgaagccccgctattatcgctggcggggcagtgcaattaattattgtatgtttataacggtgtcagcccgtatttagcccttgcacgattgcaagcctcattgacgactccgttctcaccagacatggcgaattctctgcatgtggacgatcgatttttatatatcgtgcagcaggcatttttgcccggggttcctgcaagggcaatacatcgggggtttttctgattggtaccgctcatgcatcggtgaaaaggggatatttgttcagtgagcctggcgggaatagtaccgccagcatcgtcggcttcggcccagtaaaaagagacgcggaaaaatgcacaacaggcaccacacgtcatgcatggattcagattgctcataattcaccagtacagctaaaaatcgtaaagagaacagcggtacatcgtatgtaagaacgtaccgcggttggctggggaactttcgatagtgtgagtattgaatgatttccagccgttaccgattttacgtactaattcgtgattaaaccactcgttagcaggctgcctgatacctttccgtgtctcctgaacactatggtgtgcatatgagaaagcccatcgttacaggtgatattgacgatcgcttccacatcatttaaacgatttttggggctctgaggtggaattcttccctcgaccgatggataagtcttagtccgccgaagggggcttagccggacaggaatcgctaatcttaatgaatttgtcgttatagaccagatagtgattccccggctgacgtaactcaggctgatgaaccacgtctcccggacgtagataccaggcatcgccttcctcttcggtcgaatcacatcctggcttaatcagtagcttaaaccatgtgttgccagtgttacttaccgttcctgtcaccttgtcgaaggaccatttaaactgaacctgacgtggtcgtactaccagaatggtatccatcaccaccaccggctccgtgctgaccacgccgccggttgggctgcgtcttgtatggttacgagtggggacctcgcgaaatgagacccggtagtagcgctcgcggttatcccgtggaccatgatagtaaaatttaaaatactcgctctcaccagcctgcaacgccagctggcggggggcgaaaagcagttcaacatccaccggtcgggtgcgcaattcactgctgcccgggctatcaatagcactgatggcaatacggtatatccgtgcgcttttgttgttattcactacacgtttgctgacaaagtcagtctcggacggcagcgaaaatgtcagattgccgaccgaaatcgcctgtgtcaaaggtgccgccagcatacagaccgctgtcagcagggccttagttaatgttacgccacgtcgcctgaacatgaatctctcctgaagcgctgacttcgccaaaccagccgttatcatctaccgtacgcagcgaaatggcgttatccattggaatcgaaaatttgactgtggtcttatccatctgccccacttcgccagagatatcagtccacggtgtggtcaaccacagcgcatcggtcatatcccgccagctatcatcgcacccggcatcgtaggtttttgtagctccgttgcgggtaataaaggaaagtgtcgccgggaacggtactttcgccttaccgtcatcggagctgaagacacaataggagcgcccgccaatcacctgcgcgggtccggtcaccttgatcagcacttcgtcggcaactgttttaccgctggtggttacgatatagccgaaatcgagtgccgactcgccgctgccaacatatccctcccgcgacggtgtctgagtatattcatcggagataatactgatgctgaaatcacggggtttgataatcagcgtgttggaggtagaaaattcataccagccagactccggtgatgtggtgttctgaaagcgaaagttgaatagatctttggtgttgatatcgctgatcccgaggttcaccatctgcttaaagaagttgctcgagaagaaaacatagatcgagtctgcgctcttcatctcgttgaaggtgtagtaataggcggtattgctcaccggtttccatgaactgccattcagactgaactgcatatcgtacgccccgacggccgaggctaacgacgagttggcgatcgccgggaatatatggattgaggtgttgctgagtccgtttgtttgcagggtatagttaaccatcttacaacttaatcctgaacggctgccgatggtttgcgtccggcagtcggcgttcccttcgcccagagtcggtactccgtcgctgttgataaatacttccgccagcgagtgggtatttatcaaccgtagatttgctgctttcgtatgggtgacgttgcgaacataccagttgccggaggcctgatccttacagcgtgcgccgctgctggcgtcatagttcacagaggtctggcaggcattgatggtcattgtaaagctgctgccgacgggcatttgttgcatatactggtaaaacgcgtctgacaacatgccgtgcatccacttcgcgccgccgctggtcaccgtcgcgccataaaatccactggcgtcggtggtttgcggcaggataagactggtggtcatattacacccagcgtaccagttgatgcagcgcaagccagttaaaggagatgaaactggtgaattttccagccacatatcaaacttccagttggtataaaggccggtgttgtaaccgttatcaatgtagccgaggctttgctgatagatggttcctgaaccagtgtattttaaaccggtccagcggttggcaccggtcaggcgcggatccagcgccccgccaggagtgacgaaaaagttgtcgtctgagttgttttcgacaaacacaaactcgcgtgccggtgcatccgcccaggttgttttgctcactgccgctctgagcgcagttactggccagattagcgcgaaaattatcatcgttattagtaggttaactctcattctcttctcctgtctgcgtcaccgccgcccacgatgagaggccgctgcagaccacatcaccgacccagacggcaccgcgcgcctggttgagttccagagccacttcgcaggttttattgccactgtagcgaaaatcgatagtggggtatttcttatccacgtccatgacaaactcgccgttttcatcggttcgggttcggccgatatggttgttaatccgtgcgttagccagcagtgtgccgtcttccgcacggatacgaccggagacggtaaccatctgcttcacctctggctcaatgacagcgacattgcctggatagagagtcagacgacttttgcggccgctgacgatatcgtaactgtcgagtgagtttttgctgttctgtaactccacctcatatcttccatagggagagagcgggagatagttacgcttgccgttaagcgggaaaatccgcccgttgattttggcgctgatctgaccgtcgtcctccagcccggtgttgaatatcaccccagcgttgccatcagtccgcccgctggcagcaatgtttttaccctgccagccgacgctgccattggcggtcaagttggtattgacgtagccgtccgccgcgctattgacgttcagcgttccgctggcgtaacgagcgtcgaattgtgcatacgccccgccgctgagggttttgtcatcaccggtatcgccggagatggcacgtgacagattggcaccaacagtgcgaatggttccttcatcaaactgtttgcgtgctgacaggtttgccatggtgtagccgttttgatgagtcatccctgcgctaaaccagttgcccagtggtagcgagagatcgagagcgatatattttcctgtattggcgttgctgtcgccgttgttatagcgctgaataccggcccgcaggccaagcgaaccaaaggtaccgctgtagacattttgatagtaatctgccgtgtaataatggctgttgtaacggcggtcatcattgtagctgatgctgaatgtgcccagcttcgaccacagtgagttcaggttgagtgtgccgccgattgcacggttgtcggcatcgctacgtcgcaattgattgccaatgcgggttttttcctgattaacccacagcgaactaaagcctcccggtagagtggcgctgatgctgccgatgctgctccatgagctgtcactggccagcatattttgcaggttaacgttgatcgcccccccaagcggcagcgtcagacgggtttcacccaccgcctgattatcgtatccatatcccgttgccgcccagctaagcgtactcaatgagccggaggtcgaggcacctgctagccaactctctttagctggtcgcgtctttttcccgttttccgaccagcgatccatatgaaagctaccgccccatacctgccacgccagtggtgcaccgacgccgcgcccccggctaaacagcttattgacccgctgggtgcgtttgctgatcacgcgaccgttaacgatcacctcaacttccacatcgtaaatcccgtacggtagaccccgggtatccacttcatgattgcccatagtgaagttctgaacgcttagtagccgcccatcacgggtgagatgtacttcgcccgccgccggtaaaaaggcgatcactggcgtggctgactggctgctgtcgaagatggtggagctggcctggtttccccaggaaaggccgtaaatcttccctgctgaaatggcggtcatcggccctaaggactgcaagttccaggtgtcgagcattccaccggcaaatcggtgaccggcaaaatcgcgttcatacatcgctttatataattcactgtcctgttgaccgctaccgatcccgtacagcgagccgtcgagcaccacatgatgttcgcgcagtgcagtaacgttattcagcgacagatagctggatgtgttgctcccgccgttacgcaactggttgttatagacgcccaagttatagctcagattactgctgagggtgttaacactggactgcccgatgtcttcgctacgtgagcgtagtacggtgcccagcgcttcgcgcttgaccactagctgcagcagcagttggcgcaagctgagatccagctgcgcgttgtcagtcagggggatggtaagggcctcattgaacggggcgttggccagagccatcagctgctgtcgagtttgttcgctgacactggcgttatcttcactctcttccagctgtattttccggatgcgtagctgtccatcgtccagccagataaaagcgctgccgattcgctgatcgtcctggcgaccctggctaccggcgagatgaatatagagcgggacgctcatgccgtcctgaagcgcctgactgaaggcctgcggaataatcaccccacctatttgctgcgcacttatgtcagcagcgctggcatcgggctgaacgaacaaaaagaccatgccgaaggcaaactgggctttcagtcctggggagaaccgtcgtaaaggcattgtcgttatccatctgcacagctatctatttcacgggaatgaacttatcaccctgccaaagtgcaacccgtcctttgttatccgcagtgtccacgcgggtaaaacgacgcgacttgcccggcatcaggtagtaattctctttacactccttaccgttggcggctttcaggcaaggtccgtaggcgaggatccgcagcgtcgcatttcctgtatttgtcagggagccgttggcgtactgaaagtggtagttcgcctgacgaggggcgacgaccagaatggtgccgatgcgggcggaagcagtggccacagcgctgcggttggcattatcgcgctgcgcatcactgagggcctgatcaaaccagacaatgcggtagtagcgctctttttcatctgcgggtcccttatagaagaagcggatcacttcgctggcttgggcgggtagcagcaagctggcgggagtgagtagcaactcatccggcttgtccattgagataacctgcccgtcgtcaagcggtgaagagagccgttcgagacggatattgataaggcgaccactgtcggtactgtttttgatcgttttgctcagcgtgctgctgtcactgttcataaacgatgatatatcgccgacatccagcgcctgggccggagatattccggaaaacagcagagcgagaggcagaaggtgctttttcataacaattccgtccaggaataaagcaggggggctacccctgctggtacatcagagagattaactggtccaggtcgcgtcgaactgtacgctaacgtcgccgctccagatgccttccggtagagtgctgtaatctgttactgcggtggtaccattggtggtaccgctgatgatggagaaggtgaaaccatcctgtgcggtggtacgattgctggcattgtaaccgttagccagcgggctaaggttgccgcccagtacgccgttggcggtatcgatcatcacggtatcgccagttttttcgactgccgcgccgttataatccacgcccacattcagtgtggaacctgaggtatccaactgggttaatgtgttggtgataagacgtgaggtcagtttaaaggcggtagccgttgagtcaccctcgatagccacgtcaaatagacctttctgtgagttaaaacctttaatgccttcggcatactggaacgccaggctaccgagtggcgtcacaaccagcttactggtggtgtcttttttggctgttgccgaccaggtcgctacagcctgagctgttacgtcagcagcctgcgccacacccatgccggtaaacaccgttaccagagctattgccagaaccttttttttcattgcatttcttcccgagttgaattgaggacgtgatgtcccagtgagtcattttttaaaactaacttgcctggagtttactgaaccaacttatatatttttgagtacagcttggcctcagcattacgccgatgggtatacactgtcttcacactacaattttcaattctggcaatcgatttaggttgcattccctgggccgtcatgcggataatttccatttcccggtccgtgattttatctttcttaatatcttttctcaggaacctgccattaatcacatagaccagttcttttctaatatcacgactcagtccagcgtataccacgcccctaatattgctattgtaataccaataatttgctaaggcctctgactttctggccgcaatcaatacgacctgtttcccctttaccgcggataaccattcattatcacggtttataaattcagataaagaatccgtactgagattgataaacacgaaatcttttctaattttctccaacgatagataaattaatctgtcgatatccacaatcagttcagatagtcctttatagaagtaggcgtcatggggagaccagatgtatttatcagaacggttttgacattccatatggtttttaacctcatagtccctactgtaatcactttgccatgtcactactttccaaacctgtaatttttacaggtgcattcagtttccttagtaaaccggaagtaaataagatacgtagtacatatcaataaaggttaaacgagattaagtttaattattttcgattgggcttaaatttatgttttttttcccgatgagtgtcaatatgtgaacggaaaaggaattcaatggttaagtcaatatttagaaaaactgaaaatattgcttttttgataagaagaaaaagacatttggtttcataaggttattggcaatataacgttcaattcttacttgcattttatattggtcaggaactttgccctgaagtgttaggaatagtcttaatgcgctgtgtgatggactagtaaaaaaacaagttttaagggtaagggatagaatataaaactatgatgagctgtcattgaagatgatttgccaatcagtaagatattttaatggattaacatgccgcacaaaatggttacaggtgttcattccaataagtaatggaaaattgaacgggcgtatgtacgtcatctgttcggtaagcccccaagagccagattaagtgaagttaaacgaaggctgccagctgtcacaggaacgatggcctttttgtcagggcactgcattcagttatctgtgcgcgttactctaactggcactcgaacgtcggcgacggggttaccggtggatcagactgttcctgtggcgtaaacgtttttatgttagtaccaacagatttaccacatttatcatcttaacagtttgagtgaaaatgcaggctgcgccgcaaagggaggagactgagtggcgtgttcagtctaaaagagggttgatgccagcatacaggggcgaagctggtcaacaagtcaacattaagataatggaatattcggagagaaacgtcaggcagttggcctcaaatgaacaggaagaatatatccccaggaaaattaatgttggtgttataaacacaccaacattaattcgatctgattattaatcagacaaatatcgttaatccgtcgaattttgaatcaacgttttttcttacgaccctgaacggccttaaaacgtggattagatttacaaatcacatatagccgtccttttcgcttcacaatctgacagtctggatggcgttcttttgcggtacgcagagagttaagaactttcatcacgccccctttttcgtgctaacaaaacgaccaaaacgttgggtgaatcgtgcaacatttccttctgatgccactgttctcagcttccctgtatagaacgggtgcgatttagaagagacatcaattgtcacgtatggatacgttacgccatccagctcaatctcacggtctgttttgatagtcgagccgattttaaagtactcatcaacactggtgtcgtggaacaccacagtacgatactcaggatggatattgggcttcatcatttttacctgttatgttataacataaccataaagatacatgctcatccggatcatttcaacactcaatccctgtgactctttgtggatgtggaattttcgcaacggggaactctggcattgttagcagccattggtgacgctcccataaacgcctggatgagtgattgatgatggttttgctgagagtatggatttttcgagaatggaggttatctccactttactggccgataatttatcgcagtatgattgattacctgacagcgtgtattcctctcccacggatataataattacttacaaaaaagggagaggatgcatattttaaatatcactgaagtgaacagtttatttccgttattaatagaaatggagaaataaataggcgtattctacaattgcgacaaaaacaacgatattaatcagtttatgactgatttgctgtactttattctctttcattggtacttcctcgctttaaaaaagagtgcacttcgtaagtgcccttatataaataacgagtttggtcaaccaattttttgacatgtatcacaaatttgaatagatgtattacatcaactatcttttattgcaccaacgtcattgatatatgtcgcctgaagtcagttccgggaatgagtctgatctcaagactggcccagtccgggcgttgattggtgctgaggagcatatcgcatctcatcataatgtcgtatctcctggggtgttatacaagatatcgttgttggtgacctgggagaggaattgagttctattaaaccgtcaactatgccggatacatactggattacactgcaggcacgccttatgagagaacgtgccgcagtgacgggttaattatctgaaagaatttgtgaggctgtatcggttactcattgatttgatagttttactctcgggagaataatagatatttaatccattaacggaaaccagccagttcctttcgatgcctgaatttgatcccatagtttatccggaatggttaattcatgaacaagttgtgttatcgttcatgagaagcataacgtaaagggaaaagctcgattagacggcagaatttgtcaggggttatgaacgaaattcataaatctgtttgagtgttgcgatgggtagtgcaagttcgatatctccgcaatttacagtccgatgaaggaaaatgaatatccataaaaaatatattggtttatcctggcatatatacctatttcgacgtatttccaatagttttaattaaaggcaggtcattgttattcactctgaatagtgaattattcactgtccgcagagtaagaaatataacttaggtatctatttaatgacttgcacaaaaagctaaattttcccccataaataaaaatataatcccgcgcccaaccacctgatgagtggctataggcactggatatattaggtggcggtgcactttcttacataaaggtatttccttttctgcggaaaaggaaatcgggaaatccccggtttttctgacaagcagacgccattatttgtgtctgcctatgttcgttaattcgttcatcaggaaattatctcaatgtcacattataaaacaggtcataaacaaccacgatttcgttattcagttctggcccgctgcgtggcgtgggcaaatatctctgttcaggttctttttccactcgctgtcacctttaccccagtaatggcggcacgtgcgcagcatgcggttcagccacggttgagcatgggaaatactacggtaactgctgataataacgtggagaaaaatgtcgcgtcgtttgccgcaaatgccgggacatttttaagcagtcagccagatagcgatgcgacacgtaactttattaccggaatggccacagctaaagctaaccaggaaatacaggagtggctcgggaaatatggtactgcgcgcgtcaaactgaatgtcgataaagatttctcgctgaaggattcttcgctggaaatgctttatccgatttatgatacgccgacaaatatgttgttcactcagggggcaatacatcgtacagacgatcgtactcagtcaaatattggttttggctggcgtcatttttcaggaaatgactggatggcgggggtgaatacttttatcgatcatgatttatcccgtagtcatacccgcattggtgttggtgcggaatactggcgcgattatctgaaactgagcgccaatggttatattcgggcttctggctggaaaaaatcgccggatattgaggattatcaggaacgcccggcgaatggctgggatattcgtgctgagggctatttacccgcctggccgcagcttggcgcaagcctgatgtatgaacagtattatggcgatgaagtcgggctgtttggtaaagataagcgccagaaagacccgcatgctatttctgccgaggtgacctatacgccagtgcctcttctgacactgagcgccgggcataagcagggcaagagtggtgagaatgacactcgctttggcctggaagttaattatcggattggcgaacctctggcgaaacaactcgatacagacagcattcgcgagcgtcgggtactggcaggcagccgctatgacctggttgagcgtaataacaacatcgttcttgagtaccgcaaatctgaagtgatccgtattgctctgcctgaacgtattgaaggtaagggtggtcagacactttccctggggcttgtggtcagcaaagcaactcacggactgaaaaatgtgcagtgggaagcgccgtcattactggctgagggtggcaaaattaccggtcagggtagtcagtggcaagtaacgctcccggcttatcgtccaggcaaagacaattattatgcgatttctgcggttgcctacgataacaaaggcaatgcctcaaaacgcgtgcagacagaggtggtcattaccggagcaggtatgagcgccgatcgcacggcgttaacgcttgacggtcagagccgtattcaaatgcttgctaacggtaatgagcaaagaccgctggtgctgtctctgcgcgacgccgaggggcagccagtcacgggcatgaaagatcagatcaagactgaactagccttcaaaccggctggaaatattgtgactcgttccctgaaggccactaaatcacaggcaaagccaacactgggtgagttcaccgaaactgaagcaggggtgccggaacgtatgagatcacggcgtcggcaggaaatgaccagccttcgaatgcgcagtctgtaacgtttgtggccgataagactacggcgaccatctccagtattgaggtgattggcaaccgtgcagtggcggatggcaaaaccaaacagacgtataaagttacggtgactgatgccaataacaacctgttgaaggatagcgacgtgacgctgactgccagctcggaaaatttagttctggatcctaaagggacggcgaaaactaatgagcaaggacaggctgttttcaccggctctaccactatcgcagcgacatatacactcacggcgaaagtggaacaggccaacggtcaggtatcgacgaaaactgctgaatctaaattcgtcgcggatgataaaaacgcggtgctcgccgcatctccagaacgtgtagattctctggtggcggacgggaagactactgcaacaatgacggttaccctgatggcgggagtcaatcccgtaggaggaagtatgtgggtcgacattgaggctccggaaggagtgacggagaaggattatcaattcctgccgtcgaaggctgaccatttctcaggtgggaaaatcacgcgtacatttagtaccagcaagccaggtgtctatacgttcacattcaacgcactgacgtatggcgggtacgaaatgacgcctgtgaaggtgacaattaacgccgttgctgcagagactgaaaatggcgaggaggagatgccataatttgaatagtatgaaagttacgatctaataaagaataatggtgttgaaatattcaacgccattattcactgaataccttgcctgatactgattaaatagtatcaggcaaggataaaactcaataagagatagtgaccaactaaaccggacgaacgggaataaaaatttcgcaaacaacatcattgccatccttttctacgaaatcttcattgtaataaaagcgctcaatatcgctgccgttcactctggctaaccccctggcaggtaactctatcagatagatgttacgcacccagtcaggataattttcccagtttccttcataacggaaagaggcataaagtcctcgggtcgttgtccactcttttggcatgtcagcatattcacataccgtaccagcaaaagtttcaaccgtgagcaaatcgaccgattttgttgacggttcaaacgtggaaacgaaatagatatccgtcttaaaattcttcatacatctggctaaatgatgacgtcgtagtttgacttcttcatccggtgatttattcgacacttcaatgtcatatttaaatgagttgccaaaaataggtgtctcaggaaagttgattaatctacactccgtcttttgctgttgacgtattaaaaaagaagggaagatatttgcgagatcccaataatcacggtggcggtattcacggggagagcagccgaataactttttaaattcgcggctgaatgactgctgtgaatcaaaatgcaaagagagtgcaatatcaagcatagatttcgcggtgagccggacaagaatggcggcacgacaaagccttcgtttgcgaatgtattctcccaaaggcacatgcatgaaatttcggaacagaagctggatgttgcgtctgctgtagccagatttctgtgcgatatcttcgattgaaatagggtgctcaagattgcactcaatccactccaggagctgctgtagaatcttctgcctgatcatctcattctccgttaattctttgtcatatcgcacattttcgttataccctgggccctaagtgtatcaaaaatagcaagggcgaaggcaaaagcactggtagcgtctgcttcgttgtccccgaaaatagagaggtttcagtcctacattattaatgaattttttgcataagtgatatcaaaatccacatactactttgaggttacgttttaacgtagactcattgttcatgcctaatggagggactgacagtggaattttccgtatagtctgcttcagagtattgcagatgcccatcaaaaatcgatttctcactgacagataaagaaatggcacaaattagttcgcttgatttgggttatgttggggagtcggtaaaacattttaatcctgaatttgttcgtggttgtcttgctgtaaaaatacatgattgatattaatcatgtattttacctaagacgacaaaaaccttttaacagggagtgatattgatcttcactctgtcatatctccggtaatatggcgtcaggcttcatcatcagaaagggggcctgacgcctgaaaaagtgaacaacagacagtgttcggattatcaatattcagtttttaacgttgaactggattcattactgcgttgtttaagaatttcccgcgccgaatctgccattatcatgactgcacctgccagcatcagagtatctttcaataccaggcgaccagcaccggataaataagggaaaccatgatgagcgtcacccaatgcgggtacccatgcctccggggtggtgattaaaaatgagagtgttaccagcggcgtggtaaatgccatcagtcctcccaataaacctaaccagcgattgacaggattagccaaaaccagcagagcaataatcacctccacgacgccaagaccgttggaaaaaccataggtattattggccgtttgccatgcccttgcttctggtttgtattcgccttcgtgagtcagatactgtttatagtcttccgggtgttcataaaagaacgacattagtggactgtttgcgacgaatggtgtaatgctgtctgcctcgtaagggacaaactttaataacccaatccacataaaaacaattgcaatactcagacgaatcaatgtcaggccaattttatctccccgacttaacaggtgcaggtatttttccattgtgaacatccttatttatacaatactgctgttgcggttgaattattatcaattcgcatcgatgtgactttccaggatgaagcattatattttctggctatatcagcaatggtatcctccagaactgtcggtgatgctgatactgacgagacgctgatatgtttcagaattattttatcatctgcattggtggaaaatgccataacgccagataatagtgttgcaaataaaacagattttttaaacatataaaataccatcaatgaagtgattaagaagttatagagtaacagagaattaataagattcttttctctgagacgccagaatatttgttctggcgtctgattttgagtttatttgactaatgaaaatagatcattgagtgattcgctcatcgacggatgagtaaatatctgatcgcgtaatatgctataaggcagcccggcatccatcaccattttcactatattgatcatctcgtgggagtcaacacacagcagtgatgcccctaacatacgttgggttttattatcaacaatcgcttttaataccccacgagtatcattcatcactctggcacgcggaattgcagctacaggcaatgtcaccacctgaatatcagcaccactctctctggcttgttcttctgtcataccaaccctggacaggggcggtgtcataaatacggaataaggcacatttttccgatcatcagtactacgtttgccttcacccagtaactcatcacgtacaatgcggtaatcatccagtgatatgtaagtaaattgcagcccgccggtaacatctcccatcgcccaaatattgtctgcggtggtatgtaatcgcttgtcaacgacaattgccccgcgctcgtttactgcgataccggcattttctggatgtaacgaagcggtagccggttgacgaccggaagctattaacagtgcatccaccgccagttgggcgtgctcgctatgcacttgcacttgattttcatggtgactgattcgctccacatgggcattgaggataatatcgacgccctgatcgcgtaaaatcgtcgcgatattatcagcaatatcccgatcttcccgaggcaaaaacagcgaagctgcttctaaaatggttaccttgctgccaaaattagcgaacatagaggcgaactcaacgccaatatatccgccgcccaaaatacctaaatgcccaggcaattcttttagattaagtaatccggtgctgtcatatactcctggcgtggtggtaattccaggaattggcggaaccacggtttgtgcaccggtattaataaaaattttctcgccatgaatttccagatttccctcaggccgatgaacacgcaggctatgattattgataaactccgcctggccgtcgatcacgtcgatattgggcatatccgcaagattatgaaaattcttattacgtaaaaaattaaccacttcatttttacgctgtatggcacggacaaaatctgtgtgctgctgtgcgtcatgaaccaatgttttggttgggatgcagccgatattaatacaggtcccgccatacattgcatttgattgttcgatgagagccactcgccaacctgcttttgccagcgtgacggctaatgtttttccagccttgccaaaaccaataatcactgcctgatatttattcatgatgatttcctgtcgaaacgcgttcatttgacatcatgactatagacgcaaaagagcaaataacatttcttcacaacgcttgatattttgtcttatcgtctgatattttctttttcttaatcagaatcacaaaacaaaaatcatgattaactatttgatggtattagattagttatttactaagattgttggtgtttgtaatcaaaaaccactcaggagtctgatatggatgcccttagccgtttgttgatgcttaacgctccacaaggaacgatcgataagaattgcgtgttaggaagtgactggcagcttccacatggtgccggggaattatcggttattcgttggcatgcgttaacgcaaggagcggcgaagctggaaatgccgacgggggagatttttacattacgcccgggaaatgtggtcctgctaccacaaaattcagctcatcgcctgagtcatgtcgataatgaatcgacctgtattgtctgcggcactcttcggttgcaacattcggcgcgttattttttaacgtctttgccggaaacgctgtttttagcaccggttaaccacagcgtggaatataactggctgagggaggcgatcccgtttttacaacaggaatccagatcggcaatgccgggagtggatgcactgtgtagccagatctgcgctacattctttaccctcgcggtgcgtgagtggattgcacaggttaatactgagaaaaacattctcagtttgcttctgcatccacgtcttggtgcggtaatacagcaaatgctggaaatgccaggacacgcctggaccgtcgaatcgctggccagcatcgctcacatgtcccgggcaagttttgcccagcttttccgtgatgtttccggaaccacgccgctggctgtattaacaaagttgcgtctacaaatagcggcccagatgttttcccgggaaacgctccctgttgtggtgatcgctgagtcagtaggctatgccagtgaatcatcttttcacaaggcgtttgtccgcgagtttggttgtaccccgggagaatatcgggaaagggtcagacagcttgcaccctgaataaaaccgccagaaatcagggcaaagataatccgcattccgggagttgtgagcctttcaactatttctatttccaacggtggtttgggctttatatattttttctgatggactctagctcagtttttaaataaaaatgcaaactaaattgcttcaattaaataaaatcccgactattacttgatacgtgattattgtcggtgatttttttgtacaccatcagtgtatatctcaataacccctgaataagtagctctgaataggtataagggatgtagccatttttaaatggatttcttatgccaaaaatgatcgtcgatttccccataaaatgtgagcgatgccgaaagaaataaaattagttattgcatttgacgtttggatgaaagattatcatttgtcatacaaatgaggggtggtatgttgctagccaattaaaaaagaacgccatatttattgatgattgatcccccggtgggggggaaacatcgggcataaatgggcatgaagtaatggagtattagttgtgaatgtcaatttctttgtcacctgtattggtgacgccctgaaatcaagaatggcacgagactccgtgctgctactggaaaaactcggctgtcgcgtaaatttcccggagaaacagggatgctgcggtcagcctgcgatcaatagcggttatatcaaagaagcgattccagggatgaaaaatctgatcgccgcactggaggataacgacgatcccattatttcaccggctggctcttgcacctatgccgtaaaaagttacccgacgtatctggcggatgaacctgaatgggcatcacgtgccgcaaaggttgccgcgcgtatgcaggatctcacctcttttattgttaataaattaggggtagtcgatgtaggtgccagtttgcaagggagagcggtgtatcacccatcttgtagcctggcccgtaagctgggagtgaaggacgagccacttacgctgctgaaaaatgtgcgtggactggagctgttgacctttgctgaacaggatacctgctgcggatttggcggcacgttctcggtcaaaatggccgaaatatccggcgagatggtgaaagaaaaggttgcgcacctgatggaagtccgccctgagtatttaattggtgctgacgtgagttgcctgctaaacatcagtgggcgattacaacgggaagggcagaaagtcaaagtgatgcatattgctgaagtgttgatgagccgctgaggatataaagatgtcgatcaaaaccagtaatacagattttaagacacgcatccgtcagcaaattgaagatccgatcatgcgcaaagcggtggcaaacgcgcagcagcgtattggggcaaatcggcaaaaaatggtcgatgaattggggcactgggaggagtggcgcgatcgggccgcccagatacgtgatcatgttctgagtaatctcgacgcttatctgtaccagctctcagaaaaagtgacgcaaaacggcggtcacgtctattttgcaagaaccaaagaagacgctacccgctacattttacaggttgcccaacgcaaaaatgcccggaaggtggtgaaatctaaatcgatggtgaccgaagagattggtgtcaatcatgtgttgcaggatgctggcattcaggtgattgaaaccgatctgggtgaatatattctccagctggatcaagatccgccatctcatgttgtggtcccggcaattcataaagatcgccatcagatccgtcgagtgctacacgaacgtctgggctatgaggggccggaaacgcctgaagcgatgaccttattcatccggcaaaaaatccgcgaagatttcctcagtgctgaaataggtattaccggctgtaatttcgcggtggcagagaccggttcggtatgcctggtgaccaatgaaggtaatgcgcgaatgtgtaccacgctgcctaaaacgcatattgcagtgatgggaatggagcgtattgcccccacgtttgccgaggtagatgtattgatcaccatgctggcgcgcagtgccgttggtgcacgtttgacgggatacaacacctggctgacaggaccgcgcgaagctgggcacgttgatggtcctgaagagtttcatctggttattgtcgataacgggcgttctgaggtgctggcctctgaatttcgggatgtgctgcgctgtattcgctgcggggcttgtatgaatacttgtccggcatatcgccatattggcggtcatggatatggctctatttatccagggccaattggtgcggtgatttctccgctacttggcggctataaagattttaaagatttaccctacgcctgctctttatgcacagcttgtgacaacgtgtgtccggtgcgtattccgctgtcaaaactgattttgcgtcatcgtcgggtgatggctgaaaaagggatcaccgcaaaagcagagcaacgggcgataaaaatgttcgcttatgccaatagtcatccaggattgtggaaagtcgggatgatggccggtgctcatgcggcaagctggtttatcaatggcggcaaaacaccactcaaatttggcgcgattagcgactggatggaagcacgcgatcttcctgaagctgacggagagagtttccgtagttggtttaagaaacatcaggcgcaggagaaaaagaatggataatcgaggcgaatttttgaataacgttgctcaggcactgggtcgcccgctgcgacttgaaccgcaagcagaagatgcgccgcttaacaactatgctaacgagcggcttacccaacttaaccaacagcagcgctgtgacgcgtttattcagtttgccagcgatgttatgttgacgcgctgtgagctgaccagcgaggcgaaggcggcagaagctgcaatacgtctgtgtaaagagctgggagatcagtcggtcgtgattagcggtgacacgaggctggaggaattggggattagcgaacgtttgcagcaggaatgcaatgccgttgtttgggatccggcgaaaggtgccgagaatatctcgcaggcagagcaggctaaagtgggtgttgtgtatgctgaatatggtttaaccgaatcgggaggcgtggttcttttttccgccgccgagcgcgggcgttcattgagcctgctcccggaatattctctttttatcctgcgtaaaagcactatcctgccgcgtgtagcgcaactcgcagaaaaattgcatcagaaagcgcaggccggtgaacgaatgccttcctgcattaacatcattagcggccccagttcaacggcggatattgagcttatcaaagtcgtcggagttcatggcccggtgaaagcggtgtatctgattattgaggattgttgagagagatatgaagtctggacataaacctgaagaaggcatacgaggttgaaaatagcgtttaggacaacctgacttaaccccgttccgtcatggttatgctgctcttctgtaaatatcctggtattaccaatgccaggatatttacagtgaaaaagacaggcatccattcctgaaaacgggttcccttcccggtcattgtcacttcagctttatacaggcactctctatcagaatgttgtttattactgcccagagttttgttggtattcatctaccatttttttgacaaggcaaaacattacagaaattacaatgcttagaaaaaatcccagagccaggcaaatggcagcagggtatttattttttatttctggtgagcttatagttacacagccatcaccgttcggatacaatgaccagttcctggtcaggtatatcatttttgtataaagctcactgttaattgctgaaggcgtttgtatctcatcgagaacttgcctgccattatgatattctgacgcataccatttgataatagaggcctgcacgcgagatatttcctcttcagcagttggtaaagctctcttatctcctgaccattccagccttatttctctgttcttgacatctgggctggtgtgaaaaaatgtagtaattcgctgaataacatcttcagtcattgtagtctgacaggcaaaattattattgctatcacagctaacaagtatacctggcgttgtctggtttatttttaggctgtaaatcacttttatattgtctttattgatatacagaaacaacagcaccatagccatacatatagccataataaaaaggataacacgaatctttttcttcagataaaataaaatctcaatcagatcgatatcctgtttgatttgttcacgcataatatatccagagaataaaatctgtcgcagataaggttgtattaatagtctgtatcaggaatgttcgggttaaatatcagcaaaaagcccgcatcatgaatactggatatgaagcatgagagttacctcagtgtttatataaggattcggtccccctctctggaacggtaactctcaatctgatcggttcctgcgttagttcacatcacgactcattttttcgctctcaccggcatcccatttgccacaaaatatcccgccgtgctcctcggcagcgcttcctgtccacgaatcatatccgctattttctcgccaatcataattgtcgtggcgttcaaattcccggtgataatctgcggcataatcgacgcatccaccacacgcaggccttctaacccgtgtacgcggccttcgccgtcaaccacggacatctcgtcgtaacccattttgcaggtaccgcacggatggaaggcggtttcggcgtggttacgcacgaactcatcgagctgttcatccgtctggcattcgacaccggggctgatttcgcggccacgatactgatccagcgcgggttgatgcatgatctcgcgggtgatgcgaattgcgtcgcggaactcctgccagtcctgctcgtgcgacatgtagttaaacagaatcgccggatgctggtgcgggtcgcgggatttaatccgcacatgcccacggcttggcgagcgcattgagccgacgtggcactggaaaccgtgctctttcactgcattcgagccgttatagttaatcgctactggcaggaaatggtactgaatattcggccacgcaaattcctcacggctgcgaataaatccacctgcttcaaagtggttgctggcaccaacgccagtgccgccaaacagccactccgcaccgattttcggctggttccaccactgcagggcagggtagagggaaaccggttctttgcactcatattgcagatacatctccagatgatcctgaagattttcgccgacgccgggtaattcatgcaccagcggaatatcaaactccgccagcagttcagcgttgccgacgccggagcgttgcaggatctgcggtgaggcaatcgcgcctgcacataacagcacttctttgttggccgttgcgcgggttgggatggtgctgtcgccttccagccattcgacgcccaccgcgcgtttgccgtcaaaaatgatgtgatcggtcatagcgtgagtacgaatggtcaggttaggacgcgatttggcctgatcgagatagccacgcgcggtgctggcgcgacggccctgcggcgtgacggtgcgatccatcggaccaaaaccttcctgctgataaccgttgagatcgtccgtgcgcgggtagcccgcctgcacgcccgcttcaatcatcgcttcaaacagcggattgacgccgggtttggaggtagtgacgctcaccgggccatcaccgccgtgatagtcgttttcacccatatcgcgagtctcggccttgcggtagtagggcaggcagtcgaggtagctccagttctccagaccgggttcttgcgcccagttatcgagatccagcgcattgccacggatgtagcacatgccgttgatcagcgacgatccacccagacctttaccgcgtccgcactccatgcggcggttattcataaacggttcaggttccgtttcataggcccagttgtagcgtttaccctgtagcgggaatgccagggcagcgggcatctgggtgcggaagtcaaagcgatagtccgggccgcccgcttcaagcagcagcacggaggtattcggatcttcagtcagacgggtagcgagaacgttgccggctgagccggcaccaataatgatgtagtcaaattgcaaataaacctcctggttagaatatggactggaatttagccatctcaacctggatggacttcacctgggtgtaactctggagcgtcatcacgccgttctcgcgaccaatgccggagtgtttgtagccgccaacgggcatctctgccggggattcgccccaggtgttgatccagcaaatacccgcttccagctgatgaatgacgcgatgcgcgcggttcaggtccgctgtcacgatgcccgccgccaggccgtagtcggtatcgttagcgcggcgaatgacttcgtcttccgactcgtaggtcagaatggacatcactggcccgaagatctcttcacgcacgatggtcatatcgtcgctgcaatcggtgaacactgtcggtgcaacccatgcgccgttatcgaagccatcgcctttcagtacatcgccgccgcacagtacgcgcgcgccttcctctttgcctttggcgatatagcgcagcacgttatcgcgatgcgggaagctgaccagcgggccgaagttagtttgcggatcgaaaacgtcgcccgcgcgaatgcgctcaacgcgcgccagaattttctgctcaaatgcggctttgcatttcgccggaacgaagacgcgggtgccattggtacacacctgaccggagctgaagaagtttgccatcatggcgatatcggcggcgagatcgagatccgcatcatcgaaaacgatcagcggtgatttaccgcccagttccatggtcacttctttcagggaagaggccgccgagttagccatcacttttttgccgctggcgacaccgccggtaaatgacactttggcaatgcccggatgctcggtcagatattgcccggtctccgcgcccacgcccggcaacacgttaaatacgccgtccggcaggcccgcttcgctgtaaatttcagccagctttaacgcggtaagcggggtaacttcgctcggtttgaaaatcattgcgttgcctgccgccagcgccggggcggatttccacagggcaatctggatcgggtagttccatgcgccaatccctgccactacgcccagcggttcgcggcgggtatacacaaaggacgtttcacgcaacgggatctggctgccttccagcgccgggatcagcccggcgtagtactccagcacgtccgcaccggtaacgatatcgacggttgaggtttccgaatatgcttttccggtgtcgagggtttccagttttgcgagttcgtcattgcgttcacgcagaatatcaacggcccgacgcagaatacgcgagcgctccatggcggtcatcgacgcccagattttttgcccctgctgggcgcttttcacggcgcgatcgacatcctcgcgcccggcggcctgcacggtcgccagcacgttaccgttggccgggttaatggtctcgaaggtgcgaccgctggtggcggaggtataaccaccatgtatataaagctgctgttctgccattcgggacatcacgtctcctcggttaatcggtgggtagatgctgagtgataaagtggcgggtcagggaattagcgcgggttttatccagcggtttgccgctcagagccgcgcgcagccataatccatcaatcagcgcggccaggccgtagcccgcttcctgtgcctgttcgcgcggcaattcgcgacgaaactcgctcaccagattcgacagcaagcggcggctgctgacctgctgtaaacgatagagcatcggctgatgcatactgctggcccagaacgccagccaggctttcatcgccgcactgctcacctgcgtttcatcgaagtttccgccaacaatcgcctgtaatcgctgctctgcactgccctgcggaagtgcatgtaatcgattcaaaaccgcgtcacgcagctgactggtgatatcgcgcatggttgcttccagcagaccatttttgtccctgaaatagtggctgatgatccccgtagaaacgcctgcacggcgggcgatctgcgcgatcgttgcatcgtgcatgcccacttcatttattgcttccagtgtggcgtcgatcagttgtctgcgccggatcgactgcatccccaatttgggcattttcgccactccattcatcagcggtgtttatctattaaagcggttattgattggacgttcaatataaaatgtgtcttaattgttacgaatttgattttaaatagtaacaataacagtggggatactggatgacagacctttcacacagcagggaaaaggacaaaatcaatccggtggtgttttacacctccgccggactgattttgttgttttccctgacaacgatcctgtttcgcgacttctcggccctgtggattggccgcacgctggactgggtttctaaaaccttcggttggtactatctgctggcggcaacgctctatattgtctttgtggtctgtatcgcttgttcgcgttttggttcggtgaagctcgggccagaacaatccaaaccggaattcagcctgctgagttgggcggcgatgctgtttgctgccgggatcggtatcgacctgatgttcttctccgtagccgaaccggtaacgcagtatatgcagccgccggaaggcgcgggacagacgattgaggccgcgcgtcaggcgatggtctggacgctgtttcactacggcttaaccggctggtcgatgtatgcgctgatgggcatggcgctcggatactttagctatcgttataatttgccgctcaccatccgctcggcgctgtacccgatcttcggtaaacggattaacgggccgataggtcactcagtggatattgcagcggtgatcggcactatcttcggtattgccactacgctcggtatcggtgtggtgcagcttaactatggcttgagcgtactgtttgatattcccgattcgatggcggcgaaagcggcactgatcgccttgtcggtgataatcgccacgatctctgtcacctccggtgtcgataagggcattcgcgtgttatcggagcttaatgtcgcgctggcgctgggattgatcctgttcgtattgtttatgggcgacacttcgttcctgcttaatgcactggtgctgaatgttggcgactatgtgaatcgctttatgggcatgacgctcaacagttttgccttcgaccgtccggttgagtggatgaataactggacgctcttcttctgggcatggtgggtggcatggtcgccgtttgtcggcttgttcctggcgcgtatctcgcgtgggcgtaccattcgccagttcgtgctgggcacgttgattattccgtttaccttcacgctgttatggctctcggtgttcggcaatagcgcgctgtatgaaatcatccacggcggcgcggcatttgccgaggaagcgatggtccatccggagcgcggcttctacagcctgctggcgcagtatccggcgtttacctttagcgcctccgtcgccaccattactggcctgctgttttatgtgacctcggcggactccggggcgctggtgctggggaatttcacctcgcagcttaaagatatcaacagcgacgcccccggctggctgcgcgtcttctggtcggtggcgattggcctgctgacgctcggcatgctgatgactaacgggatatccgcgctgcaaaacaccacggtgattatggggctgccgttcagctttgtgatcttcttcgtgatggcggggttgtataaatctctgaaggtagaagattaccgccgtgaaagtgccaaccgcgataccgcaccgcgaccgctggggcttcaggatcgcctgagctggaaaaaacgtctctcgcgcctgatgaattatccgggcacgcgttacactaaacagatgatggagacggtctgttacccggcaatggaagaagtggcgcaggagttgcggttgcgcggcgcgtacgtggagctaaaaagcctgccaccggaagagggacagcagttgggtcatctggatttgttggtgcatatgggcgaagagcaaaactttgtctatcagatttggccgcagcaatattcggtgccgggctttacctaccgcgcacgcagcggtaaatcgacctactaccggctggaaaccttcctgttagaaggcagccagggcaacgacctgatggactacagcaaagagcaggtgatcaccgatattcttgaccagtacgagcggcaccttaactttattcatctccatcgtgaagcgccgggccatagcgtgatgttcccggacgcgtgattgttattgcataaaacagcgccatgtctgcatatggcgctgtttctcctacctcttgatacgttatatctatacggttaagcccttagtatctattgatgattaccagacaacagataataaaaaagaaaagaactattgcagcccaaaacctacatttgggctgttgcgaatgttcaataagtttagtcttatttaatgtaaatattgctgatcatttgaaatgacgcattattcatgagaaatgtgtatcgtaaatcaactgaaattaacgcaaccatttgttatttaaggtttaattatctgtgtgtgatattttattgaatgttttaaatattgtttttattggcattgctataatattggttatcatttgctgaatggattcagtcttaatgagtgggtttttaagggacaggcatagagtaatgatacgtatgcataaccaacatctttactcattatgtcattgaatgttgacgctatgtgtttatgagggagaggtattttcagttgatctggattgttaaattcatataatgcgcctttgctcatgaatggatgccagtatgtagtgggaaattataaatattgaaatagtccaactacttctttattaccaaaaatgagtatctgaattttaatattgcattcttgcgtgattatctcctgagtttgacttgtgattacctttttaaggtatttagcgtaactgtttttgagcgagcatcagaggtaaagataatcttcttgatagtgatgtgggatgttatacgtatggcatcgctgatgtttatggttaccccttatgtgtgctcaggaatcgacaggtaatcactcatactgaacagcgataaaagataaaggtgtgttcatgaattcatgtgattttcgtgtttttctgcaagagttcggtacaacggttcatttgtcattgcctggtagcgtatccgagaaagaacgactgctactcaagctgctgatgcagggaatgtctgtaacagaaatatcacagtacagaaatcgcagtgcaaagacaatttcacatcaaaagaaacagctctttgagaaactggggattcagagcgatattactttctggcgcgatattttctttcagtacaatccggagatcatatccgccacggggagtaatagtcacagatatattaatgataatcactatcaccatatcgtcacgcctgaagccatcagtctggcgttggaaaaccacgaattcaaaccgtggatccaaccggttttctgcgcgcagactggggtactgacgggctgtgaggtgcttgtccgctgggaacatccacaaacgggaattatcccaccggatcagtttattcctctggcggagtcatccggtcttattgtcataatgacccgccaactgatgaaacagactgcggatattctgatgccggtaaaacatttgctgccggacaatttccatattggcatcaacgtctcggcgggttgttttttggcagcgggatttgaaaaagagtgtctgaacctggttaataaattaggtaacgataaaatcaagctggttctcgagctaacggaacgtaaccctattccggtaacgccagaagccagagcgatatttgacagccttcatcagcacaacattacctttgcgctggatgactttggtacgggttatgcgacctatcgttacttgcaggcgttcccggtcgattttattaagatcgataagtcatttgtgcaaatggcgagtgtcgacgaaatctccggtcatattgtggacaatattgtcgaactagcgcgtaagcctggtctgagtatcgtggcggaaggggtagaaacccaggagcaggcggatttaatgatcggtaaaggcgttcactttttgcagggctatttgtactctccgccagtaccgggtaataaatttatctctgaatgggtaatgaaagcaggtggttgatgtaaaccgctattcacagcgcatcgggaggttggcagcgattaattctcccgatgcagtaaatcctgatagatccccgttaatatgccatttggcgcaaattgttttttaatccactgcgtcacctgacccgtagcagaatgctgagtcgccagtaacatgcgcgaatcctggcgcggattatggatttgtcgggtaaccagcagggattgcgtcatcgcctcacggaccatgtaatccggcaaaaaaccaattccttcacctaaaatctggcactgacatttggtgttgaaatctggcaccagagttgacccctgcccgtgcagcaaccagcccacttttttattaatcgtatgcgcggtgtcctccaccataatattagggtagagacgcagttggctttcggcgatgggttccggcacaaaggctaacgggtgatccggggcgatagcaaaagcccagcgaatcgcgccaatttcagtgtaatcaataccgccgccgtccagtagtgtatcgggtgcgccgatggcgatattggcctgattattaataatcgcatcccagacgccgttatacacttcggtggtgacggtaatctggcaggtaggaaactgctttttcagcacctgtaacaagcgtgcggtgtgtttgggcgtataaagcagctgattaatacaaatgcgcacacgcgcttctatgccctgcgaaatagtatcgatactgcgtttgatggcataaaaatcattcagcaggtcggtagctttgcggaaaaaataacgcccggactccgttaactcaatgctgcgggtactgcgagtgaacagcaccacatccagccccgtctccatacgcttaatggtgtagctaatggcggaagtggttaaacccaactcttctgcggctttactgaagctgccaaaacgcgcagcggtagtaaatgccaacagattctcttcggtaaaaattgagttcattaaaccattctcgccattatctactatgaatttctccagctatgactgtagaggtatcggttaaagatagataatcatttttgaataacttttaatacccgtcgcgtttagtcgtcgcttcgcttaatttttgtccaccatattctgaaattacccccacgcagttacccgccagaaaacccagtaacgtcaccgtccagttcatcccgctggcaaaaaacagcgtcatgccgagaaagccaccgggaataaaggacagtaaccagaaacgcccttgccagaccactaccgccgagaagggtacggtagtaattacgctcgcccagaacgcggacagtccacttacagaggccagccaaccagcagtcagcgcggcgaaaaacgcccacaccatcccggaataattaaccgccagacttctgataaaccccgatttaccgccgcctgcggcataaaaactgcaaaaggcgacgaagccaatggttcctaataattcccatccttgagagagcccgacatgtgaagacactaactgccaaagccctgcacaaataccgacggtgacacccgttgccgtgagtccgttcatcttgttcccctctggttagacatggacgaaagctactcttacatgtgcagactatagagaaataaaacctgattgagtgaaagggtatcgggtcaaagaaacaaatattgcactaccgcacactgcgaaaagattgttgaatattattcaacaaaaaggcgagatacggcgaattaaatttaagcgggttcttttatcagattatcgttgctattctcaattcatcgaaaacagccacaaaaaccaggggaatgtgaatgagtataaaaaatctacctgccgactatttattggctgcacaacagggtgatatcgataaagtaaaaacctgccttgcgctgggtgtcgatattaatacctgcgatcgtcaggggaaaacggcaattacgctggcaagtttatatcagcaagatgcttgcgttcaggcattaattgatgccggagcggatattaataagcaagatcatacctgtttaaatccttttttaattagctgtctgaacgatgatttaacgctactacgaattattttaccggctaaacccgatcttaattgcgtaacccgttttggcggtgtcggcctgacgcctgcctgtgaaaaaggccatttaagtattgtaaaagagcttttggcgcatacggagattaacgttaaccagaccaaccatgtaggctggacgccgctactggaagcgattgtgcttaatgatggtggtattaaacagcaggcgattgtgcagttattgctggaacacggtgccagcccgcatctgaccgataaatatggcaaaacgccactggaactggcgcgggaacggggctttgaagagattgcgcagttactgattgccgcaggtgcataaaccgggaggcttgctatcaacacaccagaaagacggtgtgtgtgggcgctaactgcggatgcggattttctggcgcagcgggggcaaggacaggttgaacaggtctttgccagagcggtaaatatcgcactcccggctcgccagcagttgctgacgctgctttgtgaagagtacgacaatgcgccaaacagttgtcggttggcactcactcactttgatgatctgttccggcatggtgataaggttcagtttgacgatcaaggtattacggttggtcaacatcttcatatagagatgagtcgttgtcggcgttggctgtccccaaccttgcaaatgaccgctgtgaattttcaccttatcgcctggctacagtggcacgacattattcatcagcacctgggggaaaatgaaaccctgtttaattatcgcggcgataatccgttttatcaggcgttaaataaagaattacatattaaacgacgggcagttattcaggccgtaaacgataaacaaaatatcgcctcagcggtcgccagtatgatggggttagggattggccttacgccatcagccgacgattatttaacaggtctggcgcttattttatttattcccgggcatccggcggaaaaatacaaagaggaattttatctcggtctgcaacgcggcaaaaataataccacattattaagtgccataacgctggaagccgcattacaacaacgctgccgggaaaatattcatcgttttattcacaacattatttatgacatccctgggaacgcaactcaggcaatagaaaaaattaaacatattggctccagttccggctgcgacatgctgtatggcatggccgatggttgtgcgctgagccaaacctacggagggaattatgtcagttaaaatagtcattaaaccgaatacctattttgattctgtctcgctgatgtctatctccacgcgtgcaaataaactcgacggcgtcgagcaggcatttgtggcgatggcgaccgaaatgaataaaggcgtgctgaagaatttaggactgctgacgccggagctggagcaggcgaaaaacggcgacctgatgattgtcatcaatggtaaatcgggtgcggacaacgagcagttgctggtggagattgaagaactgttcaacaccaaagcgcaaagcggctcgcacgaggcgcgttacgccactattggcagcgccaaaaagcatatcccggaaagtaacctggcggtgatttcggtcaacggtctgtttgccgctcgcgaagcgcgtcaggcgctgcaaaacgatctcaacgtgatgctgttttccgataacgtctcagttgaagatgaactggcgctcaagcaactggcccacgaaaaagggctgctgatgatggggccagactgtggcacggcgattatcaacggcgcggcgctctgttttggtaacgccgtgcgtcgcggcaacatcggtattgttggcgcatccggcaccggcagtcaggagttgagcgtccgcattcatgaatttggcggcggcgtttcgcaactgattggcaccggcgggcgcgacctgagcgagaaaatcggcggcctgatgatgctcgacgccatcgggatgctggaaaacgatccgcaaactgaaatcattgcgcttatctccaaaccgcctgcgcctgcggtggcccgcaaagtgctggaacgtgcgcgcgcctgccgcaagccggtggtcgtctgcttcctcgatcgtggcgaaacgccagtggatgagcaggggctacagtttgcccgcggcaccaaagaggcagcgctaaaagcggtgatgctctccggcgtgaaacaggaaaatctcgacctgcatacgcttaaccagccgttgattgcggatgtgcgtgcgcgtctgcaaccgcagcagaaatacattcgtggcctgttctgcggcggcacgctgtgcgacgaaaccatgttcgcggtgatggaaaaacatggcgatgtctacagcaacattcagcccgatccggaattccgcctgaaagatatcaaccgcagcatcaaacacaccttcctcgactttggcgatgacgacttcaccaacggcaagccgcacccgatgattgaccccaccaaccgcatcagtcgcttgatcgaagaggcgcgcgatccagaagtggcggtgatcgtgatggattttgtgctcggatttggatcgcatgaagatccggtcggctccaccatcgagacgatcaaagaagcgaaagcgatcgccgctgccgaaggacgcgagttgatcattctcgcctatgtgctgggtaccgatcttgatacgccatcgttagaacaacaaagccagatgctgcttgatgccggagtgattctggcgagcagcagcaccaataccggattgctggcgcgtgaatttatctgcaaaggggaggaagcctgatgagccagtcactgtttagccaaccattgaacgttattaacgtcggcatcgccatgtttagcgatgacctgaaaaagcagcatgtagaagtgactcaactcgactggacgccgccggggcagggcaatatgcaggtggtgcaggcgctggataacattgccgattcgccgctggcggacaaaatcgccgccgctaaccagcaggcgctggagcgtattatccagtcgcatccggtgctgattggttttgatcaggcgattaacgtggtgccgggcatgacggcgaaaaccattcttcacgccgggccgccgatcacctgggaaaaaatgtgcggcgcgatgaaaggcgcggtcaccggagcgctggtgttcgaaggactggcgaaagatctcgacgaggcggctgaactggcggcttccggggagatcaccttctcgccgtgtcacgagcacgactgcgtgggatcgatggcgggtgttacctcggcctcgatgtttatgcacatcgtaaaaaacaaaacctacggcaacatcgcttataccaacatgagcgagcagatggcgaagattttgcgtatgggcgctaacgaccagagcgtgattgaccgcctgaacttgatgcgtgatgtgcagggaccaatactgcgcgacgcgatgaaaattatcggcgaaatcgatctgcgcttaatgctggcgcaggcgctgcatatgggcgatgagtgccataaccgcaataacgccgggacgacactgctgattcaggcgctgacgccggggattattcaggcgggttattccgtcgagcaacagcgcgaagtgtttgagtttgtcgccagcagcgactacttctccggcccgacgtggatggcgatgtgtaaagcggcgatggatgcggcgcatggcatcgaatacagcaccgtggtcaccaccatggcgcgtaacggcgtcgagttcggcctgcgggtcagcggcctgccggggcaatggtttaccggcccggcgcagcaggtgatcggcccgatgtttgccggttataagccggaagattcggggctggatatcggcgacagcgccatcaccgaaacctacggtattggcggatttgctatggcgaccgcgcccgctatcgtcgcgctggtgggcggcacggtggaagaagctattgatttctcccgtcagatgcgcgaaatcaccctcggtgaaaaccccaacgtcaccattccgctgctcggttttatgggcgtgccgtcggcaatcgacatcacccgcgtgggtagcagcggcattctgccggtgatcaacaccgccatcgcccataaagatgcgggcgtcggcatgattggcgcgggcattgtgcatccaccttttgcctgcttcgagaaagccattcttggctggtgcgaacgttacggcgtctgacctacatgttcatgccggatgcggcgtgaacgccttatccggcctacgaatggcgcaagaatctgtaggcctgataagcgtagcgcatcaggcatttgtcaccattgccggatgcggcgtgaacgccttatccggcctacgaatggcgcaagaatctgtaggcctgataagcgtagcgcatcaggcatttgccaccactgccggatgcggcgtggacgccttatccggcctacgagtggcgcgagaatctgtaggcctgataagcgtagcgcatcaggcatttgtcaccattgccggatgcggcgtgaacgccttatccggcctacgagtggcgcgagaattgtaggcctgataagcgtagcgcatcaggcagtctggcgttggtcataaccccatcaccctctgtagcggacataacaacatgaaagagcttgtggtcgttgccattggtggcaacagcattatcaaagataacgccagccagtcgattgagcatcaggcggaggcggtgaaagccgtcgccgatacggtgctggaaatgctggcttccgattacgacattgtgctgacccacggcaacgggccgcaggtcgggctggatttacgccgtgcggagattgcccacaagcgcgaagggctgcccttaacgccgctggcgaactgtgtggcagatacgcagggcggcatcggctatctgatccaacaggcgctgaataaccggctggcgcgtcacggcgagaagaaagccgtcaccgtggtgactcaggtggaagtggataaaaacgatccaggttttgcccatcccaccaagcccatcggcgcattctttagtgacagccagcgtgacgaattacaaaaggcaaaccctgactggtgttttgttgaagatgccgggcggggctatcgccgcgtggtcgcctcgccggaaccgaaacgtattgtcgaagcacctgccattaaagcgctgatccaacaaggttttgtcgtaattggcgcgggcggcggtggaattccggtagtgcgtactgacgcgggagattaccaaagcgtggacgcggttatcgacaaagatctctctaccgcgctgctggcccgtgaaattcacgccgacattcttgtgatcaccactggcgtcgaaaaagtgtgtattcactttggcaaaccgcagcagcaggcgctcgatcgggtggatattgccaccatgacccgctatatgcaggaagggcatttcccgcccggcagcatgttgccaaaaatcatcgccagcctgacatttttagaacaaggcggcaaagaagtgattatcaccacgccggaatgcctgcctgcggcgctgcgcggcgaaacgggcactcatattattaaaacgtaaggacgtaagatgaaagaaagcaatagccgccgtgaatttctgagccagagcggtaagatggtcaccgccgccgcgctgtttggtacctctgtgccgctcgcccatgcggcggtagctggcaccctaaactgcgaagcgaacaacaccatgaaaatcactgacccgcattactatctcgataacgtgctgctggaaaccggttttgactacgaaaatggcgtggcggtgcagacccgcacggcgcgccagaccgtggagattcaggacggcaaaattgtcgccctgcgcgagaacaagctgcatccggacgccacgctgccgcactatgacgctggcggtaagctgatgctgcccaccacccgcgacatgcatattcatctcgacaaaaccttttacggcgggccgtggcgctcgctcaatcgtccggcaggcaccaccatccaggacatgatcaaactcgagcagaaaatgctgccggaactgcaaccgtacactcaggagcgggcagaaaaactgattgatttattgcagtcgaaaggcaccaccattgcccgcagccactgcaatatcgaaccggtttccggcctgaaaaatctgcaaaatttgcaggcggtgctggcgcgacgtcaggcgggctttgagtgtgaaatcgtcgccttcccgcagcacggtttgctgctgtcgaaatctgaacctttaatgcgtgaagcgatgcaggcgggggcgcattacgtcggcggcctggacccgaccagtgttgatggcgcgatggaaaaatccctcgacaccatgttccagattgcgctggactacgacaaaggcgtcgatattcacctgcacgaaaccactccggcaggcgtggcagccatcaattatatggttgaaacggtagagaaaacgccacagctgaagggcaagctgaccatcagtcacgcctttgcgctggcaacgctcaacgagcaacaggtagatgaactggcgaaccggatggtggtgcaacaaatttctatcgcctcgacggtgccgattggcacgctgcatatgccgctcaaacagttgcacgacaaaggcgtaaaagtgatgactggcactgacagcgttatcgaccactggtcgccttatggtctgggcgacatgctggaaaaagccaatctgtacgcgcagctctatattcgtcctaacgaacagaacctctcccgctcgctgtttttagccactggcgatgtattgccgctgaatgaaaaaggcgagcgtgtatggccaaaagcgcaggatgacgccagctttgtgctggtggacgcctcctgttccgccgaggcggtggcgcgtatctcgccgagaaccgcaacgttccataaagggcaactggtgtgggggagtgtggcaggttgatgcgcatttgaaacgcctgcaacggtgaatagtaagagatttaagccccagggagtggggcaatctgaatatgagtgtgtcggcagaaatggacattatctttgaggaatatgcccttattgacgttgtgtagataactatttgtctacgtgaaaagatcatcagttttgccgattttagtcttttacagatagcaaatatcacacttacaggcgctcgccttatggggaacgttgctgctctgtttcattcaggctcgcggcatgttggggctggatcgggtggtttaaatattggctatattcaatggacgcgttttgccgcgatgacatatcaggcgttgccaaatacacatagctaatcaggagtaaacacaatgaagatcaaagctgttggtgcatattccgctaaacaaccacttgaaccgatggatatcacccggcgtgaaccgggaccgaatgatgtcaaaatcgaaatcgcttactgtggcgtttgccattccgatctccaccaggtccgttccgagtgggcggggacggtttacccctgcgtgccgggtcatgaaattgtggggcgtgtggtagccgttggtgatcaggtagaaaaatatgcgccgggcgatctggtcggtgtcggctgcattgtcgacagttgtaaacattgcgaagagtgtgaagacgggttggaaaactactgtgatcacatgaccggcacctataactcgccgacgccggacgaaccgggccatactctgggcggctactcacaacagatcgtcgttcatgagcgatatgttctgcgtattcgtcacccgcaagagcagctggcggcggtggctcctttgttgtgtgcagggatcaccacgtattcgccgctacgtcactggcaggccgggccgggtaaaaaagtgggcgtggtcggcatcggcggtctgggacatatggggattaagctggcccacgcgatgggggcacatgtggtggcatttaccacttctgaggcaaaacgcgaagcggcaaaagccctgggggccgatgaagttgttaactcacgcaatgccgatgagatggcggctcatctgaagagtttcgatttcattttgaatacagtagctgcgccacataatctcgacgattttaccaccttgctgaagcgtgatggcaccatgacgctggttggtgcgcctgcgacaccgcataaatcgccggaagttttcaacctgatcatgaaacgccgtgcgatagccggttctatgattggcggcattccagaaactcaggagatgctcgatttttgcgccgaacatggcatcgtggctgatatagagatgattcgggccgatcaaattaatgaagcctatgagcgaatgctgcgcggtgatgtgaaatatcgttttgttatcgataatcgcacactaacagactgaaaaaattaataaataccctgtggtttaacatattaacttcgctctccacttaactttttagttaaggagagcgaaataatatcaaagtagcagtaaaacctataacgtaaatttaaattgttaaattaacgccctccagtacacaatacttcacacgttagttatgagcgatttctgatagtgcctggtttaatcagagctttattatctgcgacgtttatttttatttaagagagatcgcgatgatatcattaaaagctccgcacaataatttgatgccatatacgcaacaaagcatacttaatacgtttaaaaacaatcagttaccagaggatatcaaaagctccctggtttcctgtgtcgatatattcaaggttttgattaaacaatattatgattatccttatgattgtcgtgatgatttagtcgatgacgacaaactcattcatctcatggctgccgtacgagactgtgagtggtcagacgataacgcactcaccataaatgtgcagtttaatgatttccctggattttatgactggatggattaccctgatcacccggttaagtttgtttttcacatacttgaaaatcaaaaagggacagtttgggtatatgaccaggatgatgcgtttcttgatattaaagcaaacgtgcaggctggacgctttaccgggcttaagaaattagtgcagtttatcgattcagtgcgaacagattgcaaatgtattcttcttgaataccatatgcctttgctgagaattttccctaaagggaaagagtgtatgcatgtggaaaaatggcttcgcgaaatgtcgtctattccggagacagacgcgcccattaagcaggcgcttgcgcatggattattattacacttaaaaaatatctaccctgtttttcctgaatcactggtgatgttattgctctctgttctggacgtaaaaacatacagagatgatgcgcgattaaatgaatggatatctaatagagtgcaggaattaggtgacagatattatcctgtaaataagcacgttaaaatccgctacactctttagttcagaaagggttccacctgcaagttgttattccacctgagagtgaatcgcaatgcaggtaatcatttcatctgtatatctgtatgccaactggcattccatctcttttttcgccgatattttgttgtgatcggcgacacttcgcttaaaaaagcaccagtagtggtttcgcagccatgcggtgtataaaaaatgatctcatgcagatgttttgtgaatgtgttggttgacattcatatgaaaaaaatcataattccatcatgtttgtgtggggtcttttctgtatcttacgcatcgcactcaagcctgacagaaaatatgctgtaaggctcatatcaaaaaccgccattagctcatcaggaagagcagacgacaaccaggattgttgtatggtacggggttcgaggcctcgatggcggtccaacttttcaaaactcttctgaatcagatccccttattatcatccctgcaaagtggaacattgccattgtttggctattcaggatggggcagaccaatgaaaaaagcccacacaggggagagtgggctgaaatgggaagctaaagactcaagtaaacttatcggaaataaggaccacgcattacgggggctatcatcgccgatggccgtgattcggcaaatcaggttgattacgtagagagtaaattatctgctcaccgctgcgtcaccccttcgtaaatcaggcgtagcgcgaatacaccaataattgcaccaataacccgactggcaacgcgttgcatacgcccataagcacgacgcacagcgggcaaagaaaacgcctgactaagaaaaactcgccagataattgatgcgagcacaatccccgcccaggccattaaacgtgcccatgttggtgtttcggcatttaatgttactgagaaaatactgataaaaaataaaacggtttgcgggttagagagatcggtaattaatccgcggcgaaaaaagacataccagggggcgctaatcggttgttgtagtgtgctcatttgcggtgttgactggcggcgcatgctgcaccacgcaaaccataagagataagcgccgccgacgattctgataagcgaaaaaatctcctcacactgcgtaattagcgttgcaagaccaaacaaacccaacccggaataaaatgcatcgcccagcgccacgcccagcccggtcagcacccctgcgcgtcgaccggaagccaggctggtttgtactaccacaaagagattggctcccggattaaaaaaagtaatcacgaacagtcctacggtcaggtaaacggcatgcaaaggatccatagtgatttcatccataaataagtgaactaactgcatcatatttctaccaaaaataatcgggtacgagagagatcacaaagtgtcttatttccggttactggcgtttatgccctgactgaactaattattaatcaacccaataatgtgggtgggtgatagtgtgataacaactctggagccgtaatatgaaaataatctctaaaatgttagtcggtgcgttagcgttagccgttaccaatgtctatgccgctgaattgatgaccaaagcggaatttgaaaaagttgaatcgcagtatgaaaaaataggtgatatttcaaccagcaatgaaatgtcgactgcagatgcaaaagaagatttgatcaaaaaagcggatgaaaaaggggctgatgtgttggtactgacctccggtcaaactgacaataagatccacggcacggcaaatatttataagaagaagtaattctgaatcctatgtaaacatctccgatgcgtaagtttatcggtgatcatctattgaaatttatgccggataaagcgttcgcgctgcattcggcagttcagcttttcagccgccgccagaacgtcgtccggctgatgcctaaataattcgccgctgctgttttatcgccattaaatttctccagtgcctgttgtggtgtcagtaagcgtggagcgggagttttcgccgactcgcgcgccagttccggcagtagcagttgcataaactgcggcgttaaatccggcgtcggttccacacttaaaaacagcgccagtcgttccatcatattgcgcagttcacgaatattgcctggccagtcgtagtgcagcagcacagtttcacttgcctgtaacccctggcgtaatgcagcagaaaatggggcggagagcgccgccagagacactttcaaaaagctttccgccagcggaagaatatccgccacccgctcgcgcagtggtggcaattgcagacgcaaaatactcagccgataaaacagatcacggcgaaaacgtccttgctgcatatcttcttccagattgcagtgagtggcgctaatgacccgtacatctaccggaacaggctgatgcccgccgacgcgggtgacctctttttcttccagcacccgcagcagccgggtctgcaaaggtagcggcatttcgccaatctcatccagaaacagcgtaccgccgtgggcaatttcgaacagcccggcgcgacctccgcgtcgcgagccggtaaacgccccttcctcatagccaaacagttctgcttccagcagcgattcggcaatcgccccgcagttgacggcaacaaacggatgcgactttttgccctgtcgcgcatcgtggcgggcaaaatattcccgatgaatcgcctgggccgccagctctttgcccgtccccgtttccccctcaatcaacaccgccgcactggagcgggcatacagcaaaatagtctgccgtacttgttccatctgtggtgattgaccgagcatatcgcccagcacgtaacgagtacgcagggcgttgcgggtggcatcgtgagtgttatggcgtaacgacatgcgcgtcatatccagcgcatcgctgaacgcctggcgcacggtggcggcggaatagataaaaattccggtcattccggcttcttctgccaaatcggtaatcagccctgcgccgaccaccgcttcggtgccgttagcttttagctcgttaatctgcccgcgtgcgtcttcctcggtaatgtagctacgttggtcgaggcgcaaattaaaggttttttgaaacgccaccagcgctggaatggtttcctgataggtgacaacgccgatagaagaggtgagttttccggcttttgccagtgcctgtaacacatcgtagccgctcggtttaatcaaaataactggcactgacaggcggcttttcaggtacgcgccgttagagccagccgcgatgatggcgtcacagcgttcgtttgccagtttcttgcggatgtaggtcactgctttttcaaagccaagctgaataggggtaatgttcgccaggtgatcaaactcgaggctgatatcgcgaaacagctcgaacaggcgcgttacagataccgtccagataaccggtttgtcgtcattaagccgtggtggatgtgccatagcgcaccgcaaagttaagaaaccgaatattgggtttagtcttgtttcataattgttgcaatgaaacgcggtgaaacattgcctgaaacgttaactgaaacgcatatttgcggattagttcatgactttatctctaacaaattgaaattaaacatttaattttattaaggcaattgtggcacaccccttgctttgtctttatcaacgcaaataacaagttgataacaaaggatgggctatgtctctacactctccaggtaaagcgtttcgcgctgcactgactaaagaaaatccattgcagattgttggcaccatcaacgctaatcatgcgctgttggcgcagcgtgccggatatcaggcaatttatctttctggcggtggcgtggcggcaggttcgctggggctgcccgatctcggtatttctacccttgatgatgtgctgaccgacattcgccgtatcaccgacgtttgttcgctgccgctgctggtggatgcggatatcggttttggttcttcggcctttaacgtggcgcgcaccgtgaaatcgatgattaaagccggtgcggcaggattgcatattgaagatcaggttggtgcgaaacgctgcggtcatcgtccgaataaagcgatcgtctcgaaagaagagatggtggatcggatccgcgcggcggtggatgcgaaaaccgatcctgattttgtgatcatggcgcgcaccgatgctctggcggtagaggggctggatgcggcgatcgagcgtgcgcaggcctatgttgaagcgggtgccgagatgttgttcccggaggcgattaccgaactcgccatgtaccgccagtttgccgatgcggtgcaggtgccgatcctcgccaacatcaccgaatttggtgccacgccgctgtttaccaccgacgaattacgcagcgcccatgtcgcaatggcgctgtacccactttcagcgttccgcgccatgaaccgcgccgctgaacatgtctacaacgtcctgcgccaggaaggcacgcagaaaagcgtcatcgacaccatgcagacccgcaacgagctgtacgaaagcatcaactactaccagtacgaagagaagctcgacaacctgtttgcccgtagccaggtgaaataaaaaacgcccgttgattgtattcgacagccgatgcctgatgcgtcgctgacgcgacttatcaggcctacgaggtgcactgaactgtaggtcggataagacggatggcgtcgcatccgacaaccgatgcctgatgcgccgctgacgtgacttatcaggcctacggggtgcactgaactgtaggtcggataagacgcatagcgtcgcatccgacaaccgatgcctgatgcgccgctgacgcgacttatcaggcctacggggtgaactgaactgtaggtcggataagacgcatagcgtcgcatccgacaacaatctcgaccctacaaatgataacaatgacgaggacaacatgagcgacacaacgatcctgcaaaacagtacccatgtcattaaaccgaaaaaatctgtggcactttctggcgttccggcgggcaatacggcgctctgcaccgtgggtaaaagtggcaatgacctgcattaccgcggctacgatattcttgatctggcgaaacattgcgaatttgaagaagtggcgcatctgctgatccacggcaaactgccgacccgtgacgaactcgccgcttacaaaacgaaactgaaagccctgcgcggtttaccggctaacgtgcgtaccgtgctggaagccttaccggcggcgtcgcacccgatggatgttatgcgcaccggtgtttccgcgctcggctgcacgctgccagaaaaagaggggcataccgtctctggcgcgcgggatattgccgacaaactgctggcgtcgcttagctcgattctcctttattggtatcactacagccacaacggcgaacgcatccaaccggaaaccgatgacgactccatcggcggtcacttcctgcatctgctgcacggcgaaaagccatcgcaaagctgggaaaaggcgatgcatatctcgctggtgctgtacgccgaacacgagtttaacgcctccacctttaccagtcgggtgattgcgggcaccggctctgatatgtattccgcgattattggcgcgattggcgcactgcgcgggccaaaacacggcggggcgaatgaagtgtcgctggagatccagcaacgctacgaaacgccggacgaagccgaagcagatatccgcaagcgcgtggaaaacaaagaagtggtcattggttttggtcatccggtttacaccatcgctgacccgcgccaccaggtgattaaacgtgtggcgaagcagctctcgcaggaaggcggctcgctgaagatgtacaacatcgccgatcgcctggaaacggtgatgtgggagagcaaaaagatgttccccaatctcgactggttctctgctgtttcctacaacatgatgggcgttcccaccgagatgttcacaccactgtttgttatcgcccgcgtcaccggctgggcggcgcacattatcgaacaacgtcaggacaacaaaattatccgtccttccgccaattatgttggaccggaagaccgcccgtttgtcgcgctggataagcgccagtaaacctctacgaataacaataaggaaacgtacccaatgtcagctcaaatcaacaacatccgcccggaatttgatcgtgaaatcgttgatatcgtcgattacgtcatgaactacgaaatcagctctaaagtggcctacgacaccgcacattactgcctgctcgacacgctcggctgcggtctggaagctctcgaatacccggcctgtaaaaaactgctggggccaattgttcccggcaccgtcgtacccaacggcgtgcgcgtccccggaactcagttccagctcgaccccgtccaggcggcatttaacatcggcgcgatgatccgctggctcgatttcaacgatacctggctggcggcggagtggggccatccttccgacaacctcggcggcattctggcaacggcggactggctttcgcgcaacgcggtcgccagcggcaaagcgccgttgaccatgaaacaggtgctgaccgcaatgatcaaagcccatgaaattcagggctgcatcgcgctggaaaactcctttaaccgcgtcggcctcgaccacgttctgttagtgaaagtggcttccaccgccgtggtcgccgaaatgctcggcctgacccgcgaggaaattctcaacgccgtttcgctggcgtgggtggacggtcagtcgctgcgcacctatcgccatgcgccgaacaccggcacgcgtaaatcctgggcggcgggcgatgccacttcccgcgcggtacgtctggcactgatggcgaaaacgggcgaaatgggttacccgtcagccctgactgcgccggtgtggggcttctacgacgtctcctttaaaggtgaatcgttccgcttccagcgcccgtacggttcctacgttatggaaaatgtgctgttcaaaatctccttcccggcggagttccactcccagacggcagttgaagcagcgatgacgctctatgaacagatgcaggcagcaggcaaaacggcggcggatatcgaaaaagtgaccattcgcacccacgaagcctgtattcgcatcatcgacaaaaaagggccgctcaataacccggcagaccgcgatcactgcattcagtacatggtggcgatcccgctgctattcgggcgcttaacggcggcagattacgaggacaacgttgcgcaagataaacgcattgacgccctgcgcgagaagatcaattgctttgaagatccggcatttaccgctgactaccacgacccggaaaaacgcgccatcgccaatgccattacccttgagttcaccgacggcacacgatttgaagaagtggtggtggagtaccccattggtcatgctcgccgccgtcaggatggtattccgaaactggtcgataaattcaaaatcaatctcgcgcgccagttcccgactcgccaacagcagcgcattctggaggtttctctcgacagagctcgcctggaacagatgccggtcaatgagtatctcgacctgtacgtcatttaagtaaacggcggtaaggcgtaagttcaacaggagagcattatgtcttttagcgaattttatcagcgttcgattaacgaaccggagcagttctgggccgagcaggcccggcgtattgactggcagacgccctttacgcaaacgctcgatcacagcaatccgccgtttgcccgttggttttgtgaaggccgaaccaacttgtgccacaacgccatcgaccgctggctggagaaacagccagaggcgctggcgctgattgccgtctcttcggaaacagaagaagagcgcacctttacctttcgtcagctgcatgacgaagtgaacgcggtggcctcaatgttgcgttcattgggtgtgcagcgcggcgatcgggtgctggtgtatatgccgatgattgccgaagcgcatattactctgctggcctgcgcgcgcattggcgctattcactcggtggtgtttggtggatttgcctcgcacagcgtggcggcgcgaattgatgacgctaaaccggtgctgattgtctcggctgatgccggagcgcgcggtggcaaaatcattccctataaaaaattgctcgacgatgcgataagtcaggcgcagcaccagccacgccatgttttgctggtggatcgcgggctggcgaaaatggcgcgcgtcagcgggcgggatgtcgatttcgcgtcgttgcgccatcaacacatcggcgcgcgggtaccggtggcgtggctggaatccaacgaaacctcctgcattctctacacttccggcacgaccggcaaacctaaaggcgtgcagcgtgacgtcggcggatatgcggtggcgctggcgacctcgatggacaccatttttggcggcaaagcgggcagcgtgttcttttgcgcatcggatatcggctgggtggtggggcattcgtatatcgtttacgcgccgctgctggcggggatggcgactatcgtttacgaaggattgccgacctggccggactgcggcgtgtggtggaaaatcgtcgagaaatatcaggttagccggatgttctcagcgccgaccgccattcgcgtgctgaaaaaattccctaccgctgaaattcgcaaacacgatctctcgtcgctggaagtgctctatctggctggagaaccgctggacgagccgaccgccagttgggtgagcaatacgctggatgtgccggtcatcgacaactactggcagaccgaatccggctggccgattatggcgattgctcgcggtctggacgacaggccgacgcgtctgggaagccccggtgtgccgatgtatggctataacgtgcagttgcttaatgaagtcaccggcgaaccgtgtggcgtcaacgagaaagggatgctggtggtggaagggccgctgccgccggggtgtattcagaccatctggggcgacgacggccgctttgtgaagacttactggtcgctgttttcccgcccggtgtacgccacctttgactggggcatccgtgacgctgacggttatcactttattctcgggcgcactgacgatgtaattaacgttgccgggcatcggctggggacgcgcgagattgaagagagtatctccagccatccgggcgttgccgaagtggcggtggttggggtgaaagatgcgctgaaagggcaggtggcggtggcgtttgtcattccgaaagagagcgacagtctggaagatcgtgatgtggcgcactcgcaagagaaggcgattatggcgctggtggacagccagattggcaactttggccgcccggcgcacgtctggtttgtctcgcaattgccaaaaacgcgatccggaaaaatgctgcgccgcacgatccaggcgatttgcgaaggacgcgatcctggagatctgacgaccattgatgatcctgcgtcgttggatcagatccgccaggcgatggaagagtaggttattgtcggatgcgtcgcgcggtgcatccggcactgtgtgccgatgcctgatgcgacgctgacgcgtcttatcaggcctacccactgtttttacaccgataatttttcccccacctttttgcactcattcatataaaaaatatatttccccacgaaaacgattgctttttatcttcagatgaatagaatgcggcggattttttgggtttcaaacagcaaaaagggggaatttcgtgtcgcaagataacaactttagccaggggccagtcccgcagtcggcgcggaaaggggtattggcattgacgttcgtcatgctgggattaaccttcttttccgccagtatgtggaccggcggcactctcggaaccggtcttagctatcatgatttcttcctcgcagttctcatcggtaatcttctcctcggtatttacacttcatttctcggttacattggcgcaaaaaccggcctgaccactcatcttcttgctcgcttctcgtttggtgttaaaggctcatggctgccttcactgctactgggcggaactcaggttggctggtttggcgtcggtgtggcgatgtttgccattccggtgggtaaggcaaccgggctggatattaatttgctgattgccgtttccggtttactgatgaccgtcaccgtcttttttggcatttcggcgctgacggttctttcggtgattgcggttccggctatcgcctgcctgggcggttattccgtgtggctggctgttaacggcatgggcggcctggacgcattaaaagcggtcgttcccgcacaaccgttagatttcaatgtcgcgctggcgctggttgtggggtcatttatcagtgcgggtacgctcaccgctgactttgtccggtttggtcgcaatgccaaactggcggtgctggtggcgatggtggcctttttcctcggcaactcgttgatgtttattttcggtgcagcgggcgctgcggcactgggcatggcggatatctctgatgtgatgattgctcagggcctgctgctgcctgcgattgtggtgctggggctgaatatctggaccaccaacgataacgcactctatgcgtcgggtttaggtttcgccaacattaccgggatgtcgagcaaaaccctttcggtaatcaacggtattatcggtacggtctgcgcattatggctgtataacaattttgtcggctggttgaccttcctttcggcagctattcctccagtgggtggcgtgatcatcgccgactatctgatgaaccgtcgccgctatgagcactttgcgaccacgcgtatgatgagtgtcaattgggtggcgattctggcggtcgccttggggattgctgcaggccactggttaccgggaattgttccggtcaacgcggtattaggtggcgcgctgagctatctgatccttaacccgattttgaatcgtaaaacgacagcagcaatgacgcatgtggaggctaacagtgtcgaataacgctttacaaacaattattaacgcccggttaccaggcgaagaggggctgtggcagattcatctgcaggacggaaaaatcagcgccattgatgcgcaatccggcgtgatgcccataactgaaaacagcctggatgccgaacaaggtttagttataccgccgtttgtggagccacatattcacctggacaccacgcaaaccgccggacaaccgaactggaatcagtccggcacgctgtttgaaggcattgaacgctgggccgagcgcaaagcgttattaacccatgacgatgtgaaacaacgcgcatggcaaacgctgaaatggcagattgccaacggcattcagcatgtgcgtacccatgtcgatgtttcggatgcaacgctaactgcgctgaaagcaatgctggaagtgaagcaggaagtcgcgccgtggattgatctgcaaatcgtcgccttccctcaggaagggattttgtcgtatcccaacggtgaagcgttgctggaagaggcgttacgcttaggggcagatgtagtgggggcgattccgcattttgaatttacccgtgaatacggcgtggagtcgctgcataaaaccttcgccctggcgcaaaaatacgaccgtctcatcgacgttcactgtgatgagatcgatgacgagcagtcgcgctttgtcgaaaccgttgctgccctggcgcaccatgaaggcatgggcgcgcgagtcaccgccagccacaccacggcaatgcactcctataacggggcgtatacctcacgcctgttccgcttgctgaaaatgtccggtattaactttgtcgccaacccgctggtcaatattcatctgcaaggacgtttcgatacgtatccaaaacgtcgcggcatcacgcgcgttaaagagatgctggagtccggcattaacgtctgctttggtcacgatgatgtcttcgatccgtggtatccgctgggaacggcgaatatgctgcaagtgctgcatatggggctgcatgtttgccagttgatgggctacgggcagattaacgatggcctgaatttaatcacccaccacagcgcaaggacgttgaatttgcaggattacggcattgccgccggaaacagcgccaacctgattatcctgccggctgaaaatgggtttgatgcgctgcgccgtcaggttccggtacgttattcggtacgtggcggcaaggtgattgccagcacacaaccggcacaaaccaccgtatatctggagcagccagaagccatcgattacaaacgttgaacgactgggttacagcgagcttagtttatgccggatgcggcgtgaacgccttatccggcctacgtagagcactgaactcgtaggcctgataagcgtagcgcatcaggcaattccagccgctgatctgtgtcagcggctaccgtgattcattcccgccaacaaccgcgcattcctccaacgccatgtgcaaaaatgccttcgcagcggctgtctgccagctgtagtttatgccggatgcggcgtgaacgccttatccggcctacgtagagcactgaactcgtaggcctgataagcgtagcgcatcaggcaattccagccgcagacctgtgtcagcggctaccgtgattcatttccgccaacaaccgcgcatttatccaacgccatgtgcaaaaatgccttcgcggcggctgtctgccagctatttttccgccgcaacaaaaccgccgttctctccagtagtggcggggcaagagaaatagctttaagcccgtcatgttgtgtggcaatcgctgctggtaacaatgtggaaagggaagtgcggcgaatcagctccagaaccgcgctaattgagttcgcctcaatgaccacctgtggatgtagccccgctttctcgcagtagtggtcaatttgctctctggtggcaaattccgcgctgagcaggaccagtttttcatcatgcaagcgactcaacgccacctgttcatggacggccagcggatgatgttgcgccacgactaacgctaaactttctgtcagtaaaggaattgcctccagctccggcgaatgcacaggcgcgaaggcaatcccaacgtccaactcgtcgcggcaaagcatatcctcgattttctcctgcgacatttcctgtagctggagcgtgatgctgggatagcgcgcatagaaatccgccattaaggggccgataaagtagctcgtaaaggtgggggtgacggcgatacgcagcgatcctcgcgtcagatcggcaacatcatgaatcgcccgtttacccgcccccagttcctgtaacgcccggctggcgtactgtcgccagacttctcctgcatcagtgagacgaatcgttcgcccgctacggtcaaacagcggcacgcctaaactctcctctaactggcgaatctgctgggaaagcgcaggttgggagacgtacaacgcactggcggcacgggtgaagctgccatgttcagccacggcaagaaaataattgatatgtcgagagagcattcgcaacctataagtaaatccaatggaactcatcataaatgagacttttaccttatgacaatcggcgagtagtctgcctctcattccagagacagacagaggttaacggtgaaagagattattgatggattccttaaattccagcgcgaggcatttccgaagcgggaagccttgtttaaacagctggcgacacagcaaagcccgcgcacactttttatctcctgctccgacagccgtctggtccctgagctggtgacgcaacgtgagcctggcgatctgttcgttattcgcaacgcgggcaatatcgtcccttcctacgggccggaacccggtggcgtttctgcttcggtggagtatgccgtcgctgcgcttcgggtatctgacattgtgatttgtggtcattccaactgtggcgcgatgaccgccattgccagctgtcagtgcatggaccatatgcctgccgtctcccactggctgcgttatgccgattcagcccgcgtcgttaatgaggcgcgcccgcattccgatttaccgtcaaaagctgcggcgatggtacgtgaaaacgtcattgctcagttggctaatttgcaaactcatccatcggtgcgcctggcgctcgaagaggggcggatcgccctgcacggctgggtctacgacattgaaagcggcagcatcgcagcttttgacggcgcaacccgccagtttgtgccactggccgctaatcctcgcgtttgtgccataccgctacgccaaccgaccgcagcgtaaccttatttttaaaccatcaggagttccaccatgattcagtcacaaattaaccgcaatattcgtcttgatcttgccgatgccattttgctcagcaaagctaaaaaagatctctcatttgccgagattgccgacggcaccggtctggcagaagcctttgtaaccgcggctttgctgggtcagcaggcgcttcctgccgacgccgcccgcctggtcggggcgaagctggatctcgacgaagactccattctactgttgcagatgattccactgcgtggctgcattgatgaccgtattccaactgacccaacgatgtatcgtttctatgaaatgttgcaggtgtacggtacaaccctgaaagcgttggttcatgagaaatttggcgatggcattattagcgcgattaacttcaaactcgacgttaagaaagtggcggacccggaaggtggcgaacgtgcggtcatcaccttagatggtaaatatctgccgaccaaaccgttctgacagccatgcgcaaccatcaaaagacgttcacgatgctgctggtactggtgctgattggtcttaatatgcgaccactgctcacctccgtcgggccactgctaccgcaattgcgccaggcgagcggaatgagctttagcgtggctgccctgttgaccgctctgccggtggttaccatgggcgggctggcgctggccggaagctggcttcatcagcatgtcagcgaacgtcgcagtgtcgccatcagtctgttgctgattgccgtcggtgcattgatgcgtgagctttacccgcaaagtgcgctgctgcttagcagcgcactgcttggtggggtggggatcggcatcattcaggcggtgatgccttcggtgattaaacggcggtttcagcagcgcacgccactggtgatggggctgtggtccgcggctctgatgggcggcggtgggcttggtgccgccataacgccctggttagttcaacatagcgaaacctggtatcaaacactcgcctggtgggcgctgcctgccgttgttgcgctctttgcctggtggtggcaaagcgcccgcgaggtcgcctcttcccacaagacaacaaccactccggttcgcgtggtattcactccccgcgcgtggacgctgggtgtttacttcggtctgattaacggcggttacgccagcctgattgcctggttacccgctttctatattgagattggtgccagcgcgcagtacagcggttccttactggcattgatgacgcttgggcaagccgcaggagctttgctgatgcctgctatggctcgccatcaggatcggcgcaaactgttaatgctggcgctggtgttacaactggtggggttctgcggctttatctggctgccgatgcaattgccggtattgtgggcgatggtgtgtgggttaggtctgggcggcgcgtttccgctctgtttgctgctggcgctcgatcactctgtgcaaccggctattgctggcaagctggtggcgtttatgcagggaatcggttttatcatcgccgggcttgccccgtggttttctggcgtgctgcgtagtatcagcggcaattacctgatggactgggcatttcatgcgctgtgcgtcgttgggctgatgatcataaccctgcgttttgcaccagtacgttttccgcagctgtgggtcaaagaggcatgatgcgacgcttgttcctgcgctttgttcatgccggatgcggctaatgtagatcgctgaacttgtaggcctgataagcgcagcgtatcaggcaatttttataatttaaactgacgattcaactttataatctttgaaataatagtgcttatcccggtcgtttatttcgcgaataacccgacaaggaacgccagccgccacgacgtttggtggaatgtcttttgtgacgatactacccgcgccaataacagaattatccccgatggtgacgcctggattaataaccacatgacttccgatccagacgttattgccaatcgttatcggaaaagagtacatctcgccgttttttctcaattcatggtgtacagggtgtcccgtaacggaaagagtaacgttgggtgcaatcagtacgttatcaccgattgttaccgtgtagtcatcgacaatggttaaattgaaatttgcataaaaattgcggcctatatggatgttggaaccgtaagagaaatagacaggcggttctacccaggcgttttcccctaccgtggcaaacatttctttaatcaggctttctcttttttcaacttctgatggatgcgagtgattaaactcatacattaacgttttcccacgaagtcttttttccggtaagccttcgcacatatcggtaaatagcttgcctgctcttattctttcggtcattggcatgttcaatgcgatcactccgttatgatatgttggtcggataaggcgctcgcgccgcatccgacattgattgcttaagcgacttcattcacctgacgacgcagcagggaaagcgggccggggccgctaagcgtgaacacggaaattaaggtgaagcccagcgccaccagacccagcaccagataagcgccctggaaaccgatgctttcatacatattgcccgccagtacagacataaaaatcatcgccagttgcttaaagaagcagaaacagaccagataaatcgtcgctgaaaaacgcacttcaaactggctggtaatatatttaaagcagcccaccagcaggaacggtacttcaaacatatgcagcgttttcagaataaccacttccagcgctgaggtggcgaacgatgagccaataatacgtacagacataatagtgccaggcagcagcagggcgtttttcccaccgatgcgattaatgatcagtggcgcaaagaacataatcgaggcgttaagtaattcgcccattgtcgttacgtagccaaatacccgcgtaccctgttcaccggtagcaaagaacgaagtaaagaaattagcaaactgttggtcaaaaacatcgtaggtgcaggaaacgccaataacatacagtgacaaaaaccacagttttggctgtctgaacagttccagtgccagcttaaggctaaatgccgaatggttggcacctaccgcattggcaaccgtggcagaagagggcgcatccgttttggcgaaaaagagtaaaacggcgaggatgagtgcacagccagagcccagccagaaaacaaactgattattgatggtgaacatgatgccgacaatcgaggcacacagcgcccagccaacacagccaaacatccgcgcgcgaccaaattcgaaattactgcgacggctgactttctcaataaatgcctctactgctggcgcaccggcgttaaaacaaaagcctagataaataccaccaacaatcgatcctactaaaatgttgtattgtaacagtggcccgaagataaaaataaagaacggcgcaaacatcactaacatgccggtaataatccacagcaggtatttgcgcagcccgagtttgtcagaaagcagaccaaacagcggttggaataatagcgagaacagagaaatagcggcaaaaataatacccgtatcacttttgctgatatggttgatgtcatgtagccaaatcgggaaaaacgggaagtaggctcccatgataaaaaagtaaaagaaaaagaataaaccgaacatccaaaagtttgtgttttttaaatagtacataatggatttccttacgcgaaatacgggcagacatggcctgcccggttattattatttttgacaccagaccaactggtaatggtagcgaccggcgctcagctggaattccgccgatactgacgggctccaggagtcgtcgccaccaatccccatatggaaaccgtcgatattcagccatgtgccttcttccgcgtgcagcagatggcgatggctggtttccatcagttgctgttgactgtagcggctgatgttgaactggaagtcgccgcgccactggtgtgggccataattcaattcgcgcgtcccgcagcgcagaccgttttcgctcgggaagacgtacggggtatacatgtctgacaatggcagatcccagcggtcaaaacaggcggcagtaaggcggtcgggatagttttcttgcggccctaatccgagccagtttacccgctctgctacctgcgccagctggcagttcaggccaatccgcgccggatgcggtgtatcgctcgccacttcaacatcaacggtaatcgccatttgaccactaccatcaatccggtaggttttccggctgataaataaggttttcccctgatgctgccacgcgtgagcggtcgtaatcagcaccgcatcagcaagtgtatctgccgtgcactgcaacaacgctgcttcggcctggtaatggcccgccgccttccagcgttcgacccaggcgttagggtcaatgcgggtcgcttcacttacgccaatgtcgttatccagcggtgcacgggtgaactgatcgcgcagcggcgtcagcagttgttttttatcgccaatccacatctgtgaaagaaagcctgactggcggttaaattgccaacgcttattacccagctcgatgcaaaaatccatttcgctggtggtcagatgcgggatggcgtgggacgcggcggggagcgtcacactgaggttttccgccagacgccactgctgccaggcgctgatgtgcccggcttctgaccatgcggtcgcgttcggttgcactacgcgtactgtgagccagagttgcccggcgctctccggctgcggtagttcaggcagttcaatcaactgtttaccttgtggagcgacatccagaggcacttcaccgcttgccagcggcttaccatccagcgccaccatccagtgcaggagctcgttatcgctatgacggaacaggtattcgctggtcacttcgatggtttgcccggataaacggaactggaaaaactgctgctggtgttttgcttccgtcagcgctggatgcggcgtgcggtcggcaaagaccagaccgttcatacagaactggcgatcgttcggcgtatcgccaaaatcaccgccgtaagccgaccacgggttgccgttttcatcatatttaatcagcgactgatccacccagtcccagacgaagccgccctgtaaacggggatactgacgaaacgcctgccagtatttagcgaaaccgccaagactgttacccatcgcgtgggcgtattcgcaaaggatcagcgggcgcgtctctccaggtagcgaaagccattttttgatggaccatttcggcacagccgggaagggctggtcttcatccacgcgcgcgtacatcgggcaaataatatcggtggccgtggtgtcggctccgccgccttcatactgcaccgggcgggaaggatcgacagatttgatccagcgatacagcgcgtcgtgattagcgccgtggcctgattcattccccagcgaccagatgatcacactcgggtgattacgatcgcgctgcaccattcgcgttacgcgttcgctcatcgccggtagccagcgcggatcatcggtcagacgattcattggcaccatgccgtgggtttcaatattggcttcatccaccacatacaggccgtagcggtcgcacagcgtgtaccacagcggatggttcggataatgcgaacagcgcacggcgttaaagttgttctgcttcatcagcaggatatcctgcaccatcgtctgctcatccatgacctgaccatgcagaggatgatgctcgtgacggttaacgcctcgaatcagcaacggcttgccgttcagcagcagcagaccattttcaatccgcacctcgcggaaaccgacatcgcaggcttctgcttcaatcagcgtgccgtcggcggtgtgcagttcaaccaccgcacgatagagattcgggatttcggcgctccacagtttcgggttttcgacgttcagacgtagtgtgacgcgatcggcataaccaccacgctcatcgataatttcaccgccgaaaggcgcggtgccgctggcgacctgcgtttcaccctgccataaagaaactgttacccgtaggtagtcacgcaactcgccgcacatctgaacttcagcctccagtacagcgcggctgaaatcatcattaaagcgagtggcaacatggaaatcgctgatttgtgtagtcggtttatgcagcaacgagacgtcacggaaaatgccgctcatccgccacatatcctgatcttccagataactgccgtcactccagcgcagcaccatcaccgcgaggcggttttctccggcgcgtaaaaatgcgctcaggtcaaattcagacggcaaacgactgtcctggccgtaaccgacccagcgcccgttgcaccacagatgaaacgccgagttaacgccatcaaaaataattcgcgtctggccttcctgtagccagctttcatcaacattaaatgtgagcgagtaacaacccatcggattctccgtgggaacaaacggcggattgaccgtaatgggataggtcacgttggtgtagatgggcgcatcgtaaccgtgcatctgccagtttgaggggacgacgacagtatcggcctcaggaagatcgcactccagccagctttccggcaccgcttctggtgccggaaaccaggcaaagcgccattcgccattcaggctgcgcaactgttgggaagggcgatcggtgcgggcctcttcgctattacgccagctggcgaaagggggatgtgctgcaaggcgattaagttgggtaacgccagggttttcccagtcacgacgttgtaaaacgacggccagtgaatccgtaatcatggtcatagctgtttcctgtgtgaaattgttatccgctcacaatttcacacaacatacgagccggaagcataaagtgtaaagcctggggtgcctaatgagtgagctaactcacattaattgcgttgcgctcactgcccgctttccagtcgggaaacctgtcgtgccagctgcattaatgaatcggccaacgcgcggggagaggcggtttgcgtattgggcgccagggtggtttttcttttcaccagtgagacgggcaacagctgattgcccttcaccgcctggccctgagagagttgcagcaagcggtccacgctggtttgccccagcaggcgaaaatcctgtttgatggtggttaacggcgggatataacatgagctgtcttcggtatcgtcgtatcccactaccgagatatccgcaccaacgcgcagcccggactcggtaatggcgcgcattgcgcccagcgccatctgatcgttggcaaccagcatcgcagtgggaacgatgccctcattcagcatttgcatggtttgttgaaaaccggacatggcactccagtcgccttcccgttccgctatcggctgaatttgattgcgagtgagatatttatgccagccagccagacgcagacgcgccgagacagaacttaatgggcccgctaacagcgcgatttgctggtgacccaatgcgaccagatgctccacgcccagtcgcgtaccgtcttcatgggagaaaataatactgttgatgggtgtctggtcagagacatcaagaaataacgccggaacattagtgcaggcagcttccacagcaatggcatcctggtcatccagcggatagttaatgatcagcccactgacgcgttgcgcgagaagattgtgcaccgccgctttacaggcttcgacgccgcttcgttctaccatcgacaccaccacgctggcacccagttgatcggcgcgagatttaatcgccgcgacaatttgcgacggcgcgtgcagggccagactggaggtggcaacgccaatcagcaacgactgtttgcccgccagttgttgtgccacgcggttgggaatgtaattcagctccgccatcgccgcttccactttttcccgcgttttcgcagaaacgtggctggcctggttcaccacgcgggaaacggtctgataagagacaccggcatactctgcgacatcgtataacgttactggtttcacattcaccaccctgaattgactctcttccgggcgctatcatgccataccgcgaaaggttttgcgccattcgatggtgtcaacgtaaatgcatgccgcttcgccttccggccaccagaatagcctgcgattcaaccccttcttcgatctgttttgctacccgttgtagcgccggaagatgcttttccgctgcctgttcaatggtcattgcgctcgccatatacaccagattcagacagccaatcacccgttgttcactgcgcagcggtacggcgatagaggcgatcttctcctcctgatcccagccgcggtagttctgtccgtaaccctctttgcgcgcgcgcgccagaatggcttccagctttaacggttcccgtgccagttgatagtcatcaccggggcgggaggctaacatttcgattaattccttgcggtcttgttccgggcaaaaggccagccaggtcaggcccgaggcggttttcagaagcggcaaacgtcgcccgaccattgcccggtgaaaggataagcggctgaaacggtgagtggtttcgcgtaccaccattgcatcaacatccagcgtggacacatctgtcggccataccacttcgcgcaacagatcgcccagcagtggggccgccagtgcagaaatccactgttcgtcacgaaatccttcgcttaattgccgcactttgatggtcagtcgaaaactatcatcggaggggctacggcggacatatccctcttcctgcagcgtctccagcagtcgccgcacagtggtgcgatgcaggccgctgagttccgccagcagcccgacgctggcaccgccatcaagtttatttaacatatttaataacattagaccgcgggttaagccgcgcacggttttgtattccgtctgctcattgttctgcatattaattgacatttctatagttaaaacaacgtggtgcacctggtgcacattcgggcatgttttgattgtagccgaaaacacccttcctatactgagcgcacaataaaaaatcatttacatgtttttaacaaaataagttgcgctgtactgtgcgcgcaacgacattttgtccgagtcgtgaggtactgaaatggcaatacaacaccctgacatccagcctgctgttaaccatagcgttcaggtggcgatcgctggtgccggcccggttgggctgatgatggcgaactatctcggccagatgggcattgacgtgctggtggtggagaaactcgataagttgatcgactacccgcgtgcgattggtattgatgacgaggcgctgcgcaccatgcagtcggtcggcctggtcgatgatgttctgccgcacactacgccgtggcacgcgatgcgttttctcaccccgaaaggccgctgttttgctgatattcagccaatgaccgatgaatttggctggccgcgccgtaacgcctttattcagccgcaggtcgatgcggtgatgctggaaggggtgtcgcgttttccgaatgtgcgctgcttgttttcccgcgagctggaggccttcagtcagcaagatgacgaagtgaccttgcacctgaaaacggcagaagggcagcgggaaatagtcaaagcccagtggctggtagcctgtgacggtggagcaagttttgtccgtcgcactctgaatgtgccgtttgaaggtaaaactgcgccaaatcagtggattgtggtagatatcgccaacgatccgttaagtacgccgcatatctatttgtgttgcgatccggtgcgcccgtatgtttctgccgcgctgcctcatgcggtacgtcgctttgaatttatggtgatgccgggagaaaccgaagagcagctgcgtgagccgcaaaatatgcgcaagctgttaagcaaagtgctgcctaatccggacaatgttgaattgattcgccagcgtgtctacacccacaacgcgcgactggcgcaacgtttccgtattgatcgcgtactgctggcgggcgatgccgcgcacatcatgccggtatggcaggggcagggctataacagtggtatgcgcgacgcctttaacctcgcatggaaactggcgttggttatccaggggaaagcccgcgatgcgctgctcgatacctatcaacaagaacgtcgcgatcacgccaaagcgatgattgacctgtccgtgacggcgggcaacgtgctggctccgccgaaacgctggcagggtacgttacgtgacggcgtttcctggctgttgaattatctgccgccagtaaaacgctacttcctcgaaatgcgcttcaagccgatgccgcaatattacggcggtgcgctgatgcgtgagggcgaagcgaagcactctccggtcggcaagatgtttattcagccgaaagtcacgctggaaaacggcgacgtgacgctgctcgataacgcgatcggcgcgaacttcgcggtaattggctggggatgcaatccactgtgggggatgagcgacgagcaaatccagcagtggcgcgcgttgggcacacgcttcattcaggtggtgccggaagtgcaaattcataccgcacaggataaccacgacggcgtactacgcgtgggcgatacgcaaggtcgcctgcgtagctggttcgcgcaacacaatgcttcgctggtggtgatgcgcccggatcgctttgttgccgccaccgccattccgcaaaccctgggcaagaccctgaataaactggcgtcggtgatgacgctgacccgccctgatgccgacgtttctgtcgaaaaggtagcctgatatgcacgcttatcttcactgtctttcccactcgccgctggtggggtatgtcgacccggcgcaagaggtgctcgatgaggtcaatggcgtgattgccagcgcccgcgagcgtattgcggcattctcccctgaactggtggtgctgtttgcgccagatcactacaacggctttttctatgacgtgatgccaccgttctgtttaggcgttggagcgacggcaattggtgatttcggcagtgcggcaggagagctgcccgtgcctgtggagctggcggaggcctgtgcgcatgccgtcatgaagagcgggatcgatcttgccgtttcttactgtatgcaggtggaccacgggttcgcccagccgctggagttcctgctcggtgggctggataaggtgccagttctgcctgtgttcatcaacggtgtcgccacgccgctgcccggtttccagcgtacccgcatgttgggtgaagccattggacgtttcaccagcactctcaataaacgcgtgctgttcctgggttccggtgggctttcccatcagccgccggtgcccgaactggcgaaagccgatgcccatatgcgcgaccgtctgttggggagcgggaaagatttacccgccagtgagcgcgaattgcgtcagcaacgggtgattagcgccgctgagaagtttgttgaggatcagagaacgctgcatccgctcaacccgatttgggacaaccagttcatgactttgctggagcagggacgcatacaggaactggatgccgtcagtaacgaagagctttccgccattgccggaaagtcgacacatgaaatcaaaacctgggtcgccgcttttgccgctatttctgcgtttggcaactggcgtagcgaagggcgttattaccgcccaatcccggagtggattgccggatttggctcgttaagcgccagaacagagaactgaatatgcaggagaagatgatgagttatcagccacaaaccgaagccgccaccagccgttttctgaatgtagaagaagcgggtaaaacgctgcgcatccattttaataactgcggacaaggcgacgaaaccgttgtcctgctgcatggttccggcccgggtgctactggctgggcgaacttcagccgcaatatcgatccgctggtagaggcgggctatcgggtgatcctgctggattgtccgggttggggcaagagcgattcggtcgttaatagtggttcgcgatcggatcttaatgcacgaatcctgaaaagcgtggtggatcaactggatatcgccaaaatccacctgctgggcaactcgatggggggccatagttctgtggcgttcacccttaaatggccggagcgcgtcggcaaactggtgctgatgggcggcggtacgggcggcatgagtttgtttacgccgatgccaaccgaaggtattaagcgactgaatcagctttatcgtcagccgactatcgaaaacctgaagctgatgatggatatcttcgtttttgataccagcgatttgaccgacgccctgtttgaagcgcgcctgaataatatgctgtcgcgccgcgatcacctggaaaacttcgttaagagcctggaagctaatccgaaacagttcccggattttggcccacgtctggcggaaatcaaagcgcaaaccctgattgtctgggggcgcaacgaccgctttgtgccgatggatgcgggtctgcgtctgctgtccggcattgccggttctgaactgcatatcttccgcgactgtggtcactgggcgcagtgggaacatgccgacgctttcaatcaactggtgctgaatttcctcgcacgcccttaaggaatggtcatgacgaagcatactcttgagcaactggcggcggatttacgccgcgccgcagagcagggcgaagcgattgcaccgctgcgcgatctgattggtatcgataacgctgaagcggcttacgccattcagcacataaatgtgcaacatgacgttgcgcaggggcgtcgcgtggtagggcgtaaagtgggcctgacacatccgaaagtgcaacaacaactgggcgttgatcaaccggattttgggacgttatttgccgacatgtgttatggcgataacgaaatcattcctttttcccgtgttctgcaaccccgcattgaagcggagatcgcactggtgttgaaccgcgatttgcccgcaaccgatatcaccttcgacgaattgtataacgccattgaatgggtacttccggcgctggaagtggtggggagccgcattcgcgactggtcgattcagtttgtcgataccgtggcagataacgcctcctgtggggtgtatgtcatcggcggtccggcgcaacgtccggcggggttagacctgaaaaactgcgccatgaagatgacgcgtaataacgaagaggtttctagcgggcgcggcagcgaatgcctgggacatccgcttaatgcggccgtctggctggcacgcaaaatggccagtctgggtgaaccgctgcgcaccggagatatcattcttaccggggcattaggtccgatggtggcggtgaatgcgggcgatcgttttgaagcccatattgaaggcataggttcagttgctgcgacattttcaagcgcagccccaaaaggaagtctgtcatgagtaagcgtaaagtcgccattatcggttctggcaacattggtaccgatctgatgattaaaattttgcgtcacggtcagcatctggagatggcggtgatggttggcattgatcctcagtccgacggtctggcgcgcgccagacgtatgggcgtcgccaccacccatgaaggggtgatcggactgatgaacatgcctgaatttgctgatatcgacattgtatttgatgcgaccagcgccggtgctcatgtgaaaaacgatgccgctttacgcgaagcgaaaccggatattcgcttaattgacctgacgcctgctgccatcggcccttactgcgtgccggtggttaacctcgaggcgaacgtcgatcaactgaacgtcaacatggtcacctgcggcggccaggccaccattccaatggtggcggcagtttcacgcgtggcgcgtgttcattacgccgaaattatcgcttctatcgccagtaaatctgccggacctggcacgcgtgccaatatcgatgaatttacggaaaccacttcccgagccattgaagtggtgggcggcgcggcaaaagggaaggcgattattgtgcttaacccagcagagccaccgttgatgatgcgtgacacggtgtatgtattgagcgacgaagcttcacaagatgatatcgaagcctcaatcaatgaaatggctgaggcggtgcaggcttacgtaccgggttatcgcctgaaacagcgcgtgcagtttgaagttatcccgcaggataaaccggtcaatttaccgggcgtggggcaattctccggactgaaaacagcggtctggctggaagtcgaaggcgcagcgcattatctgcctgcctatgcgggcaacctcgacattatgacttccagtgcgctggcgacagcggaaaaaatggcccagtcactggcgcgcaaggcaggagaagcggcatgaacggtaaaaaactttatatctcggacgtcacattgcgtgacggtatgcacgccattcgtcatcagtattcgctggaaaacgttcgccagattgccaaagcactggacgatgcccgcgtggattcgattgaagtggcccacggcgacggtttgcaaggttccagctttaactatggtttcggcgcacatagcgaccttgaatggattgaagcggcggcggatgtggtgaagcacgccaaaatcgcgacgttgttgctgccaggaatcggcactattcacgatctgaaaaatgcctggcaggctggcgcgcgggtggttcgtgtggcaacgcactgtaccgaagctgatgtttccgcccagcatattcagtatgcccgcgagctcggaatggacaccgttggttttctgatgatgagccatatgaccacgccggagaatctcgccaagcaggcaaagctgatggaaggctacggtgcgacctgtatttatgtggtggattctggcggtgcgatgaacatgagcgatatccgtgaccgtttccgcgccctgaaagcagagctgaaaccagaaacgcaaactggcatgcacgctcaccataacctgagtcttggcgtggcgaactctatcgcggcggtggaagagggctgcgaccgaatcgacgccagcctcgcgggaatgggcgcgggcgcaggtaacgcaccgctggaagtgtttattgccgccgcggataaactgggctggcagcatgggaccgatctctatgcgttaatggatgccgccgacgacctggtgcgtccgttgcaggatcgaccggtacgagtcgatcgcgaaacgctggcgctgggatacgctggtgtttactcgagcttcctgcgtcactgtgaaacggcggcggcgcgttatggcttaagtgcggtggatattctcgttgagctgggcaaacgccggatggttggcggccaggaggatatgatcgttgacgtggcgctggatctgcgcaacaacaaataatgatgactgccgagaacgtgcattttgtatgcccatcccagcacgactgccggatgcggcgtgaacgccttatccggcctacggatggcgtgagaatttgtaggtctgataagacgcgttagcgtcgcatcaggcatctgcgcacgactgccggatgcggcgtgaacgccttatccggcctacggatggcgcgggaatttgtaggcctgataagacgcgttagcgtcgcatcaggcatctgcgcacgactgccggatgcggcgtgaacgccttatccggcctacgggtggcgcgagaatttgtaggcctgataagacgcgttagcgtcgcatcaggcatctgcgcacgactgccggatgcggcgtaaacgccttatccggcctacggatggcgcgggaatttgtaggcctgataagacgcgttagcgtcgcatcaggcatctgcacacgactgccggatgcgataaacgtcttgtccggcctacatttcgcccgtaggcagtcattaaatagttctgattacgcggctggcaatgtatcagtcgcgattcacctgcactcgcaacgaggttcatcttatgtcgactcgtaccccttcatcatcttcatcccgcctgatgctgaccatcgggctttgtttttttggtcgctctgatggaagggctggatcttcaggcggctggcattgcggcgggtggcatcgcccaggctttcgcactcgataaaatgcaaatgggctggatatttagcgccggaatactcggtttgctacccggcgcgttggttggcggaatgctggcggaccgttatggtcgcaagcgcattttgattggctcagttgcgctgtttggtttgttctcactggcaacggcgattgcctgggatttcccctcactggtctttgcgcggctgatgaccggtgtcgggctgggggcggcgttgccgaatcttatcgccctgacgtctgaagccgcgggtccacgttttcgtgggacggcagtgagcctgatgtattgcggtgttcccattggcgcggcgctggcggcgacactgggtttcgcgggggcaaacttagcatggcaaacggtgttttgggtaggtggtgtggtgccgttgattctggtgccgctattaatgcgctggctgccggagtcggcggttttcgctggcgaaaaacagtctgcgccaccactgcgtgccttatttgcgccagaaacggcaaccgcgacgctgctgctgtggttgtgttatttcttcactctgctggtggtctacatgttgatcaactggctaccgctacttttggtggagcaaggattccagccatcgcaggcggcaggggtgatgtttgccctgcaaatgggggcggcaagcgggacgttaatgttgggcgcattgatggataagctgcgtccagtaaccatgtcgctactgatttatagcggcatgttagcttcgctgctggcgcttggaacggtgtcgtcatttaacggtatgttgctggcgggatttgtcgcggggttgtttgcgacaggtgggcaaagcgttttgtatgccctggcaccgttgttttacagttcgcagatccgcgcaacaggtgtgggaacagccgtggcggtagggcgtctgggggctatgagcggtccgttactggccgggaaaatgctggcattaggcactggcacggtcggcgtaatggccgcttctgcaccgggtattcttgttgctgggttggcggtgtttattttgatgagccggagatcacgaatacagccgtgcgccgatgcctgacgtgccttattaggcaggggcgaaagggacttcaccccaatacacctacggcgtttacaggtatactcgctaaaaattattcagcgggtttggaaacaaagatggcaaaacttaccttacaagagcagttgctcaaagcaggattagtcaccagcaaaaaagcggcgaaggtggagagaacggcgaaaaaatcgcgcgttcaggcgcgtgaagctcgggcggcggtagaagaaaataaaaaggcacagcttgagcgtgataaacagcttagcgaacagcaaaaacaagcggcgttggcgaaagaatataaagctcaggtgaagcagcttattgaaatgaaccgaatcaccattgccaatggcgatattggttttaacttcactgacggcaatctgattaagaagatttttgtcgataagctcacacaggcgcagttgattaatggtcgtctggcgattgcccgcttgttggtcgataacaatagcgaaggtgaatacgccattattcccgccagcgttgccgataaaattgctcagcgcgatgccagcagtatagtgttgcacagcgcgctcagcgccgaagagcaggatgaagacgacccgtatgccgacttcaaagtgcctgatgatttgatgtggtaaacatagataagtcgtgcgcagatgcctgatgcgacgctatgcgcgtcttatcaggcctacggtttatgggcgaagtgtagaccggataaggcgttcacgccgcatccggcagtcgtgctattatcaacgcatattcagtttattggcgtggtaggcaatatgctcgccaataaaactggagacaaaataatagctgtgatcataaccctcgtgataacggattaacgtcttgatattcatctcctggcagatcttttcaagatttggagtccgcagctgttctgcgtaaaaatcatcactcaacccctgatcaaccatgatttccgcaacgcgttgaccttgtgaaataagactcaccgggtcgtaatccaaccaggcatctttattttcagcaagatatgcagcaaaggcttgctgtccccacggcacttgcgatggggagacaatgggcgaaaacgccgagacgctgacatattcatctgggttacgtaacgccagcaccagcgcgcccagcccgcccatagaatgaccagagatagactttttggccgttgccggaaaatgatgcatcactaaatccggcagctcgttgcggatatagtcatacattttgtaatgttcattccacggcgcttgcgtcgcgttcaggtaaaacccggcaccttgcccgagatcgtaacggtcagcatctgcgacatgactgcctcgcggactggtgtccggcgcaacaacaataatgttgtgctcagccgcgtaacgctgcatccccgatttagtaatgaaattctgctcgttgcaggtcaggcctgaaagccagtacagcaccggcaatttttcattcgcggcttttggtgggagatagacgccgacattcatttcacatttcagtgattgggaataatgccgatatacattttgccagccgccaaagctgacatgtttttcaatgagttccatcagtcattatctcagggttaatcccccggacggctgcccggggagagtattaagaacccccgcctgaagtggacggggtaaacctgcgggaaatcagtaacgaattacggttcgaatggatttgccttcatgcatcaggtcgaaggcgtcattaatttcatccaggctcatggtatgcgtgacaaacggttccagatcgatatcacctttcatcgcatcttcaaccatgcccggtaactgggaacgacctttcacgccgccaaacgcggaacctttccatacgcgaccagtgaccaactggaatggacgggtggagatttcctgaccggcacccgcgaccccgatgatcaccgactgaccccagccgcggtgcgcactttccagcgccgcacgcatcacgttgacgttaccgatgcattcaaaggtatggtcgataccccatttgttgatatccaacaggacatcttttatcggtttgtcgtagtcattcgggttaatgcagtcggtagcaccgaagcgacgcgccagatcgaatttcttcgggttggtatcgatagcgataatccgacccgctttcgcctgacgcgcgccctgaaccactgccagaccaatcgcgccaagaccaaacacggcaacagaatcacctggctggactttagctgtgttgtgtaccgcgccaataccggtggtcacgccacagcccagcaggcagacgtgttcatggtttgcttctggattaatttttgccagagacacttccgcgactacggtgtattcactgaatgtagagcaccccatgtagtgataaagcggctgcccgttgtaagaaaaacgggtggtgccgtctggcatcaggcctttaccctgggtttcgcgaaccgcaacacagaggttagttttgccagaacgacagaactcacactcgccgcactccgcggtgtaaagcgggatcacatggtcgccaggtttgacgctggttacgccttcaccgacttcaaccacaacgccggccccttcgtgaccgagaaccaccgggaatacaccttccgggtcatcgccggagagggtaaatgcgtcggtatggcaaacgccggtatgggtgactttaattagcacttcaccttttttcggtggtgcaacgtcaatttcaacgatttccagcggtttaccgggagcaaatgcaacggcagcacgtgatttcatctctcgctcttcctcaatatggtaatagattcagctatttaagataggcacgaaccagttcaatagtgtcgtcaacggattggctgacttcgcggctgtagcagtcatttcggtcaaacgtttcccggatatggctttcaagcacttctgccatcagcccattagccgcgccccgaacggcagcgatctgttggagtatggcacggcattcggcatcaccctccagcgaccgttccagagcatcaatctgcccccgaatacgacgaactcgagtaaggacctttttcttctcttccggagtactgggcatttcgcacctcatcatctgcatgcaatatactataggggggtattctatatgtcaatgcatacccccctatagtatataacactggagaataaaatttatccggtgaatgtggtcggaaaacaaagaggaaaggggggggctaatcggcagggaaggccgccccggatagcgggcggcagaaggaatcagaatttccaggtcagacgggctgcaagttgcagaccgttaaaatcatcggttggggtgtcgtaccacactttacctgccgtcagcccgagattaagttgctcagtcagcggttgaatacgttgcagactgacgctcttcatgctgccgtagcgtgtttctggcgtccagtcataggtgtaagcacctgttccgcggcttagccatagttgcgtataaccagtgccgcgcgggtcattcagacgcacggaaatcatattgctataactaccacctgcatcgctggagtcataatgggtatagcggtagctggtgatcaccgggccagtatagagtgatacgccgccttgccaggcatcgacttcgacatcatcgtaatatttagtgtagcgataaccggtcgtgaaaagcgtttttggtaacagggccaggttaatatcctgacgaaaatcctggcgggcaaagaccggcgtattatccgcaaaggcaatacccgttcgggttgtcagccagttattccatttataccagaccgcaccctgaccgcgagtggcattgaaatgttcagtttcataatcacgacgcccctgggaaagattaaaaagcagcgttgcgttttcaactttcgccaccagttcagcatacgctaaattacggttgccatgatcgccagaataatcggtaaaatcgtagcccgcggtaatggaagttaacccggcataagcgggcaatgcgctaaaaatggccgccgctaataacgtccgttttatcattttaatctcctgtacggataagttcttgtcggagtgaataagttccggtaggtaaattacgttctacaatcacgcgcgggccaagttgcgtgttcggggaaataattcgcccaggcaaaataataacttgtacgccaaggcgtgaacgctgcccgatataacaacctaatttatcgcatccggtagcgataattccctctggagttcgaacagacacgggctgttcatccagacgatgattactggtacgtacttgtgcgcctaaatatgcctggtttgcaactaccgagtcggcaataaaacattgcggaccaatcgttgcttccgcttcaataaccgcatttttaatctcggtggcaaaaccaatttttacgccattgctgattattgtgccaggacgaataaacgcataattacctatcaggcagtttgcgccaatcactaccggaccctgaataacggcaccatgacaaatacgggtattcgcgccgataacaacttcacctgcagtttcatcaataattacctggtctgcaatctgaatatttttctctttaacattaagcttcagatagtttttcagttcctgtgacagaaggttgggaataagcggttgacgcttccaccagtgcggaatagcgggtgggtttgtcgcgctgaggttcgcgtccagtaaaaaaggcaataagtccataaataatccagatggcataagctaataatacatacacaacggaaagcggcgctaaaggcaccaacaaccagcaacgatgaaaccaggcgctaaaagcaccaataacacaaactacgccgacccagataagcggaaacattgccaacaccactccatgcggcccggtggtgatgaattcattaaaccaggtagtgagataaatcccaacgccataaagcacaaccaacagcataggaaatatactgaagataccgaagcggctaaataaaagtcttttatgcaggcgcatacagaccgcgtatcccacaatccaacgccgccagcgacgccactcctcacgcgggctgttgcattcctgtgggtatacgatgcagcgattcgcctgccgaatacggtagccgtttgccaccaatgtccaggtgagatcaaggtcttcgactttagtacgatccgagaaaccgaacttacgcaatacatcagtacggaacatcccgcaggcaccgctgataataaacggtgcgccacccaggagctgctgtagcgtgtgcttcataacaatcatcggcaactttacggtcgcgcggatgtgcggtaacagacccgcgcctttcaacgcagtagagggaatgccgcctacggcatcggcaccgcgctcaatttctgccagcatatagcccattccgtcttgatcgggcggaacataggtgtcggcatcacttaaaaaaacctggtcgcaggtggcgtaattgaggccattcatcagcgcaccacctttaccggtatttttttgcgtgacggcaacaaagcggtcgccccatttgcgtttgacttccgccatgaccgcttcggtattgtccgtggagccgtcgttaacgcaaattacccggcaaaaataagggttacgcagtagattatccagtgactgcgccagacacgggccttcgttatacgcaggtataatggcgtcaatacagcctttcttttgactgggtttacgtcttagcgtacttaaaaaccatagcaacattgctatggacatacagataaatatccaggttttcatgcaatttgctcaaagaatcattttatgaattacaaagccttcacccagatcgctattgacctgttgtccgcgaaattgtgcaactgcacgcaggcgatcatgacgcatataatcgcgtcgttcctggcttttatgtttttttaatgcagcaagtttgactgtgaaatattcttctttaacggattcaaaaacctgaggcataaatgaaagccaggtacttggggtttcgtagccgagaatttgcggaatagttcggcaggcaaccattgaagcttgataaacagcaagatgatcctgatggcggtcggcatcatgcatggtatatacccgcatgatttcaacatcagaaggaatttgatttttaatgatgtcttccagggcggaaatcatatcattgagctgtaaatgagcgcgggtgtcagcaaaattaagatgaatagtttggtggcaccctaatatctttagggcgttgcgcgattcttcatggcgatcgattattccatctgtgccagagttgccggtagtcatcaccacggctgcgatataaattcctttttgcgcaagacgagcaagcgatgcgccacagcctaattctatatcgtcaggatgtgcgccaatagcaaggataccctttcttttatttgccgaagaaaggagggctgaatctaaaaccttatccacttaatgacactccattttatttattatactacaagcacaacgatgcactcagagacgtaatctctggcgcagccagatgttaatttataaatgttaaatgttgctaataactgaaaagcaagggctttcagacccgtgggttcgactgggtaatgtttctatgcaattcatatgttaagtgtttgtatgtttggtatgtatagttattttgttttatacattgtatttagatgtgatttagtttgtcaattaattgcatttaaaaaatatgttctgtgaacaagcattgtttatatacattatgtgaatgtaatatgcgagtgattgagaatgatacagtgatatatacaatgcgaatataatagttttattatatgtattgatattgatagaaataatgaagtaataaatctcgtaatgtggttgtttatgcatcactaaaatgaagtgtagtaattttcccaattgttagaacggagtaattgcatatttaatctttccttagccgtttttttgctaagaataaaatcatctgtgcgataacgactaattcttttaatgaatgtttttattcctgaatactgctcccataacaagacaggggagcagacaatcatggcaatttcatcgcgtaacacacttcttgccgcactggcattcatcgcttttcaggcacaggcggtgaacgtcaccgtggcgtatcaaacctcagccgaaccggcgaaagtggctcaggccgacaacacctttgctaaagaaagcggagcaaccgtggactggcgtaagtttgacagcggagccagcatcgtgcgggcgctggcttcaggcgacgtgcaaatcggcaacctcggttccagcccgttagcggttgcagccagccaacaggtgccgattgaagtcttcttgctggcgtcaaaactgggtaactccgaagcgctggtggtaaagaaaactatcagcaaaccggaagatctgattggcaaacgcatcgccgtaccgtttatctccaccacccactacagcctgctggcggcactgaaacactggggcattaaacccgggcaagtggagattgtgaacctgcagccgcccgcgattatcgctgcctggcagcggggagatattgatggtgcttatgtctgggcaccggcggttaacgccctggaaaaagacggcaaggtgttgaccgattctgaacaggtcgggcagtggggcgcgccaacgctggatgtctgggtggtgcgcaaagattttgccgagaaacatcctgaggtcgtgaaagcgttcgctaaaagcgccatcgatgctcagcaaccgtacattgctaacccagacgtgtggctgaaacagccggaaaacatcagcaaactggcgcgtttaagcggcgtgcctgaaggtgacgttccggggctggtgaaggggaatacctatctgacgccgcagcaacaaacggcagaactgaccggaccggtgaacaaagcgatcatcgacaccgcgcagtttttgaaagagcagggcaaggtcccggctgtagcgaatgattacagccagtacgttacctcgcgcttcgtgcaataaaaggaggcgcagatgctgcaaatctctcatctttacgccgattatggcggcaaaccggcactggaagatatcaacctgacgctggaaagcggcgagctactggtggtgctggggccgtccggctgcggtaaaaccaccctgctgaatctgattgccggttttgtgccttatcagcatggcagcattcaactggcgggtaagcgtattgagggaccgggagcagagcgtggcgtagtttttcagaatgaagggctactaccgtggcgcaatgtacaggacaacgtggcgttcggcctgcaattggcaggtatagagaaaatgcagcgactggaaatcgcgcaccagatgctgaaaaaagtggggctggaaggcgcagaaaaacgctacatctggcagctttccggtggtcaacgtcagcgggtggggattgctcgtgcgctggcggcgaatccccagctgttattactcgacgaaccgtttggtgcgctggacgccttcacccgcgaccagatgcaaaccctgctgctgaaactctggcaggagacgggcaagcaggtgctgttgattacccacgatatagaagaagcggtgtttatggcgactgaactggttctgctttcatccggccctggccgtgtgctggagcggctgccgctcaactttgctcgccgctttgttgcgggagagtcgagccgcagcatcaagtccgatccacaattcatcgccatgcgcgaatatgttttaagccgcgtatttgagcaacgggaggcgttctcatgagtgtgctcattaatgaaaaactgcattcgcggcggctgaaatggcgctggccgctctcgcgtcaggtgaccttaagcattggcacgttagcggttttactcaccgtatggtggacggtggcgacgctgcaactgattagcccgctatttttgccgccgccgcaacaggtactggaaaaactactcaccattgccggaccgcaaggctttatggacgccacgctgtggcagcatctggcagccagtctgacgcgcattatgctggcgctatttgcagcggtgttgttcggtattccggtcgggatcgcgatgggacttagccctacggtacgcggcattctggatccgataatcgagctttatcgtccggtgccgccgctggcttatttgccgctgatggtgatctggtttggtattggtgaaacctcgaagatcttactgatctatttagcgatttttgcaccggtggcgatgtcggcgctggcgggggtgaaaagcgtgcagcaggttcgcattcgtgccgcccagtcgctgggtgccagccgtgcgcaggtgctgtggtttgtcattttgcccggtgcgctgccggaaatcctcaccggattacgtattggtctgggggtgggctggtctacgctggtggcggcggagctgattgccgcgacgcgcggtttaggatttatggttcagtcagcgggtgaatttctcgcaactgacgtggtgctggcggggatcgcggtgattgcgattatcgcctttcttttagaactgggtctgcgcgcgttacagcgccgcctgacgccctggcatggagaagtacaatgagtgaacgtctgagcattaccccgctggggccgtatatcggcgcacaaatttcgggtgccgacctgacgcgcccgttaagcgataatcagtttgaacagctttaccatgcggtgctgcgccatcaggtggtgtttctacgcgatcaagctattacgccgcagcagcaacgcgtgctggcccagcgttttggcgaattgcatattcaccctgtttacccgcatgccgaaggggttgacgagatcatcgtgctggatacccataacgataatccgccagataacgacaactggcataccgatgtgacatttattgaaacgccacccgcaggggcgattctggcagctaaagagttaccttcgaccggcggtgatacgctctggaccagcggtattgcggcctatgaggcgctctctgttcccttccgccagctgctgagtgggctgcgtgcggagcatgatttccgtaaatcgttcccggaatacaaataccgcaaaaccgaggaggaacatcaacgctggcgcgaggcggtcgcgaaaaacccgccgttgctacatccggtggtgcgaacgcatccggtgagcggtaaacaggcgctgtttgtgaatgaaggctttactacgcgaattgttgatgtgagcgagaaagagagcgaagccttgttaagttttttgtttgcccatatcaccaaaccggagtttcaggtgcgctggcgctggcaaccaaatgatattgcgatttgggataaccgcgtgacccagcactatgccaatgccgattacctgccacagcgacggataatgcatcgggcgacgatccttggggataaaccgttttatcgggcggggtaatacgagagtggacggtcccctcgcccccttggggagagggttagggtgagggggcgttcaccgtactttcaacaggttaactccccctttctgagaggaaacaaaattaacgcagaatcttcttctcagccaaatccagcgcaaagtagctgaaaatcagatccgcacccgcacgcttaatcgaacctaagctttcgagcacgactttctcttcatctatagcacccgccagcgcggcgaacttaatcatcgcatactcaccgctcacctgatacgcgccaatcggcaattcagtacgttcacgcagctcacgcacgatgtcgaggtacgctccagcaggtttaaccatcaggcagtctgcgccctgggcttcatccagcagtgattcacgaatcgcctcacgacggttcattgggttcatctgatagcttttgcggtcgccttttaatgcgcttccggcagcttcacggaacgggccataaaaggaggaggcgaacttggtcgaatacgacataatcgccgtatctttaaatcccgcagcgtccagcgcctgacgaatcgcctgtacctggccgtccatcgcggcggaaggggcgatgaagtctgcacctgcagcagctgcaaccacggcttgcttgcctaaattttccagagtcgcgtcgttgtcgacgccatgctcgcacagcacaccgcagtgaccgtgagaagtgtattcacagaagcaggtgtctgacataacgatcatttctggcacggtctgcttgcagatgcgcgacatacgcgccaccagtccatcttcccgccaggcatcgctgccggtttcatcggtatggtgagagatgccaaaagtcatcacggaacgaataccggcgttggcgatgcgttcaatttcgcgtgccagatgtttctctggaatgcgcatcacgcctggcatggcttcaacggctttgtagtcgtcaatttcttcttcaacaaagatcggcaacaccaggtcgttaaggctaagtgttgtctcttcaaacatagcgcgcagcgcaggagatttgcgcaggcgacgagggcgttggattaagtctgtcatggtctgcctgatgtttgtggaatcgaggggcatagtatacctgaagcagggtagggatgttttacgaaagttgtcgcgatgttgacaagaagagaatggaagagaggccaggacatctttttaatagaaacagcaataattttatattcactgaaaatatttttaatctttatttatagctgttggttattattttttggagtttggttgcgctgctataaattgaataattaaaactttgttgcatattcataggatatttatctggtttgtgtttgtgatatttattatgcgtatgcttcaaaaacaaaattatctgcaacatgttgaaatactgtgcttttatgaatttgatgcgtgtttttctccataaattatatatgtccgcattcggacttaggggaaagaataattgaaccattcgtctgtaacgcagcataatcgttagcgcgaaacataatatgttttctatgcattgataattgatggatcaacttattacgtccctgaggagggatgacaaatgcactcctggaaaaagaaacttgtagtatcacaattagcattggcttgcactctggctatcacctctcaggctaatgcagcaaactatgatacctggacttatatcgataatcccgttacagcacttgattgggatcatatggataaggcaggcactgtagatggcaactatgtaaactatagtggttttgtctattacaacaacaccaatggtgatttcgatcagtcctttaacggcgataccgttaacggcacgatctcaacctattatttgaaccatgattatgcagacagtactgctaatcagcttgatatcagtaattcagtgattcacggttcgattacttctatgctgcctggcggttattatgatcgttttgatgcagatggtaataatctgggtggatatgatttttacactgatgcggttgttgatacacactggcgtgatggtgatgttttcactttgaacattgctaacactactattgatgatgattatgaagctctttacttcactgattcttataaagatggtgatgtaaccaagcacacaaatgagacatttgatacaagtgaaggcgttgctgttaatcttgatgtagaaagtaacatcaatatttccaataactcccgcgttgcaggtattgcattatctcaaggtaatacttacaacgaaacctacactaccgaatctcatacttgggataacaatatctctgtaaaagattccacagtgacttcgggttcaaattatatcctggatagcaatacttatggcaaaactggtcactttggcaattctgatgaaccgagtgattatgctggcccgggtgatgttgcaatgtcctttactgcttcaggttccgactatgcgatgaagaacaatgtattcctcagcaattcaacgctgatgggtgatgttgcctttaccagcacctggaatagtaattttgatccgaatggtcatgattccaacggtgacggggtgaaagataccaacgggggttggactgatgatagcctcaacgttgatgaactaaatctcactctcgataacggaagcaagtgggttggtcaggcaatttataacgttgctgaaacgtcagcaatgtatgatgttgctacaaacagccttactcctgatgcaacatatgaaaacaatgactggaaacgtgttgttgatgacaaggtcttccagagcggtgtatttaacgtagcgttgaataacggttctgaatgggatactacaggtcgttccatcgttgataccttgacagttaataatggttctcaggttaatgtttcggaatctaaattaacttcagatactatcgatttaactaacggttcttcgctgaacattggtgaagatggctacgttgataccgatcatctgactattaactcctacagtactgttgcgttgaccgaatctactgggtggggggctgattacaacctgtacgccaatactatcaccgtaactaacggcggtgtattggatgtgaacgttgatcagttcgatactgaagctttccgtactgacaaactggaactgaccagcggcaacatcgctgaccataacggtaacgtagtatctggtgtgttcgatatccatagcagcgattacgttctgaacgctgatctggtgaacgaccgtacctgggatacttccaagtctaactacggttacggtattgttgctatgaactctgatggtcacctgactatcaacggtaacggcgacgtagacaacggtactgaactggataacagctctgtagacaatgttgttgctgcaaccggtaactacaaagttcgtatcgacaacgcaactggcgctggcgctatcgctgattacaaagataaagaaattatctacgtaaacgacgtcaacagcaacgcgaccttctctgctgctaacaaagctgacctgggtgcatacacctatcaggctgaacagcgcggtaacaccgttgttctgcaacagatggagctgaccgactacgctaacatggcgctgagcatcccgtctgcgaacaccaatatctggaacctggaacaagacaccgttggtactcgtctgaccaactctcgtcatggcctggctgataacggcggcgcatgggtaagctacttcggtggtaacttcaacggcgacaacggcaccatcaactatgatcaggatgttaacggcatcatggtcggtgttgataccaaaattgacggtaacaacgctaagtggatcgtcggtgcggctgcaggcttcgctaaaggtgacatgaatgaccgttctggtcaggtggatcaagacagccagactgcctacatctactcttctgctcacttcgcgaacaacgtctttgttgatggtagcttgagctactctcacttcaacaacgacctgtctgcaaccatgagcaacggtacttacgttgacggtagcaccaactccgacgcttggggcttcggtttgaaagccggttacgacttcaaactgggtgatgctggttacgtgactccttacggcagcgtttctggtctgttccagtctggtgatgactaccagctgagcaacgacatgaaagttgacggtcagtcttacgacagcatgcgttatgaactgggtgtagatgcaggttataccttcacctacagcgaagatcaggctctgactccgtacttcaaactggcttacgtctacgacgactctaacaacgataacgatgtgaacggcgattccatcgataacggtactgaagggtctgcggtacgtgttggtctgggtactcagttcagcttcaccaagaacttcagcgcctataccgatgctaactacctcggtggtggtgacgtagatcaagactggtccgcgaacgtgggtgttaaatatacctggtaatattcttcactccgaagaaatactggtaatttaatctaaataatgcccgtcaaggatttgacgggcattactgcaaaggacgcgcaaatgttatctgtagttaaacctcttcaggaatttggtaagctcgataaatgtttgtccagatacggtacgcgcttcgagtttaataatgaaaagcaagttatattttccagtgatgtcaataacgaagatactttcgttattttagagggagttatctctctgcgtagagaagaaaacgtacttatcggtattacccaggctccttatattatggggctggctgatggtttaatgaaaaacgatataccatacaaattaatatcagaaggaaattgtacgggatatcatctaccagccaaacaaaccattacgcttattgaacaaaatcaactctggcgagacgctttttactggttagcctggcaaaatagaattctggaattacgcgacgtgcagctcattgggcataattcctacgaacaaatccgcgcaacattattatcaatgattgactggaatgaagaattgcgatcacgtattggtgtgatgaattatatccatcaacgtacacgcatatcgcgttctgtcgtcgcagaagttctcgctgctttgcgtaaaggcggctatatcgaaatgaataaaggcaaactggtcgctatcaaccgtttgccttcagagtattaatcaggacgcggggataaccaacggtttattcccgcttagctcggtcaccaggtcattgatgccatcgctcatatttttaaagcgcgtcaacggcgaacgagtgaccaccacaaacgcgccaatattcttctgcgggatcatcgccatataggtaatgaaaccgccaccaccgcctgtcttctgaataatccccggacgaccctctttcggggccatatatacccaacctaaaccaagcgcatccgctttgccggggacatccatgccaatcactttcgtaaactgcgcgcgctgataaatcaacgtctgcatgcgatctgcctggttactgcgctgataaaaatcagatgacaaatactgctgcatccagcgcatcatatcgccaggcgtggaatagacgccgccgctgccaattgccgccagcgtgttattgcacggactggcaccgcgctcagcaaccattaaacggcggcactgatccggtgagggggtgtaggtggtgtctttcatccccaatggacgggtaatctgctcttcaaacaactgggtataaggcttgccggacgcattcgccagtgcatctgccagcaggtcgaacgcaaggttagagtacgccgcctgactgcctggcgcggctttcagcttcgccgtagaaaggtatttccagcgttgctcgcgcgttggccagacaaacaccggacgatgtgccgcgccaccgggctgttcacggggcagggcgctggtatgggttgccagattgaccagcgtaatgggcgtcccattgtaggttggcacgcgtgcgcctggcggagcatatttacttagcggatcgtttaacttcacggtcccctggtcgagcaatttcaccagcatctcactggtcattagcttggtgagggaagcaatacgcacgaccgaatccagctgcgggcgaacgttattaccaggtcgcgtttcgccataactgcgaaagacgcgctggttaccgtcgataacaaccagagccatccccgtggcaccgctgccgtaaaaaatatgatcggcataacgatcgacaatatcagaggcaaactccggttcagtgatcggctgcgccgcatggacggaggtcaatgacgccgcacacagcacggcagaaaaaagcagactacgtttcaacggtggtgtccatagattgaatgaaggtaactgagcgtatttatactactcattgatagattgcaaagggcgaattagtgcaataatagtgttaaaaacgtaacggcgcgtaaacacgatctttttcctgctcaccaatgcctgcatttgtgatcctgcgcgtgttaatccgcttatgtaaacaatctttggtttgtgaaatccgtcgaaacaattcttatggtcaggctggcgaactaagcgccttgctatgggtcacaatgggcggtttcatttggctgacgctttgtagcggtcatgcggttaatacacagcagttgttaaaacgataagaagttagcaggagtgcatatgtttaagtcttttttcccaaagccgggaacgttttttctctcggccttcgtttgggcattgattgccgttatcttctggcaagccggtgggggtgactgggtggcgcgtatcaccggcgcttccgggcagatcccgattagcgccgcgcgtttctggtcgttggatttcctgattttttacgcttactacattgtttgcgtaggactttttgcattgttctggtttatctacagcccgcatcgttggcaatactggtcaatactcggtactgcactgatcatcttcgtcacctggtttttggtggaagtcggggtcgccgtcaacgcctggtatgcgccgttctatgatctgattcaaaccgcgctaagttcgccgcataaagtcaccatcgaacaattttaccgcgaagtgggcgtctttctggggattgcgctgatcgctgtggtgatcagtgtgctgaacaacttctttgtcagtcactacgtgttccgctggcgtacagcgatgaacgaatattacatggcgaactggcaacaactgcgtcatatcgaaggggccgcacagcgtgtgcaggaagacaccatgcgttttgcttcaacgctggagaatatgggcgtcagttttatcaacgccatcatgacgttgatcgccttcctgccggtgctggtaacgctctccgcgcatgtgccggagctgccgattatcgggcacattccgtatggtctggtgattgccgcaatcgtctggtcgctgatggggaccggattgctggcagtggtagggatcaaactgccggggctggagtttaaaaaccagcgtgtagaggctgcctaccgtaaagagctggtttatggtgaagacgatgccacgcgcgcgacgccgcctacggtacgcgagctgtttagcgccgtacggaaaaactatttccgcctctattttcactatatgtatttcaacatcgcccgcattctctatttgcaggtcgataacgttttcggtttgttcttgctgtttccgtcaattgttgccggtacgattacgctcggcctgatgacgcagattaccaacgtttttggtcaggttcgcggtgctttccagtacctgattaactcatggaccacactggttgagttgatgtctatctacaaacgtctgcgcagctttgaacatgagctggatggtgacaaaattcaggaagtaacccataccttgagctaaaaaggagaagtaatgtcgcgcgtcaatcctctatcttcgctgtcattgttggcggttctggttttagcggggtgtagtagtcaggctccgcaaccgttgaaaaagggcgaaaaagcgatagatgtagcgagcgtcgtgcggcagaagatgcctgcgagcgtgaaagaccgcgatgcctgggcgaaagatctcgccaccacctttgaaagtcaggggctggcaccgacgctggaaaacgtctgctcggtgctggcggtggcgcagcaggagtcaaattatcaggcagatccggccgttccgggcttaagcaagatcgcctggcaagagattgaccgtcgtgctgaacggatgcacattcctgcttttctggttcataccgcgctaaaaatcaaatcgccaaacggcaaaagttatagcgaacggttagattcggtgcgtacagaaaagcaattgagcgcgatttttgacgatctgatcaacatggtgccaatggggcagacgctgtttggttcgctcaatccggtgcgcaccggtgggccgatgcaggtcagcattgcttttgccgaacagcataccaaagggtacccgtggaaaatggacggtacagtccgtcaggaagtcttcagtcgccgcggcgggttgtggtttggtacttaccatttactgaattatcccgccagttatagcgcaccgatataccgttttgctgattttaacgctggctggtacgccagccgtaatgccgcgtttcagaacgcggtcagtaaggccagcggcgtgaagctggcactggacggtgatttaattcgttacgacagtaaagaacccgggaaaaccgaactggcaacgcgcaaactggctgcaaaactggggatgagcgacagcgaaattcgccgtcagttagagaaaggtgacagcttctcttttgaggagacggcgctgtacaagaaagtttatcaacttgccgaaacgaaaacgggtaaatcactcccccgcgaaatgttgcctggcattcaactggaaagcccgaaaatcacccgcaacctgactacggcctggtttgcgaagcgcgtagacgaacggcgggcgcgttgtatgaaacagtgatcaaacaggaatgtcaggccagataaggcgtttcaggccgcatctgacaatgtaaaacttactggcggcgatgtcgccagtgcagccatagcgccaccactgcaaaaatgaggcagcctactaaaaacgggatcagcccgaaaatggtgccgacacctaaaccaatttccacccgtgggcgacctgtttcctggacctgcattaaacgctcatagacgccgggcgcatgcactaacaggttcagcaattgcgccccagcccaaaagcaaaacagcacaaacaacgcataggcaatgttgccaggcgttgaagaggcattgcgatattttccgctaaacagcgattttgacagggtgaaatcagccataaaaacctccggaagtcatctgcttctcttctggtgtgataccagcggcttatggcaagtctgacaggtcatttagattgtcaatatcagaatcatggtaaattgatgttgggaatattcccgaagcgtgaatcttcgttgtgagtcacaaaatggcaaccttaagttaaatttattaacaattacgaaaatgttgtctacaccacagacggttgttgcagaatatgcaaggatgttgtttttcgttaacggagctgccatgaatctgcctgtaaaaatccgccgtgactggcactactatgcgttcgccattggccttatattcattcttaatggcgtggtggggttactgggatttgaagcaaaaggttggcagacctatgccgtcggtctggtgacgtgggtgattagtttctggctggcggggttgattattcgtcgtcgcgatgaagaaactgaaaacgcccaataagaatattatcgggcgttaaaatattacattgtggttttcaatgcgttatccgcagcgtgacgctccagcgccagttcaatcaaacgtgtgatcagatcggtgtaacccagaccgctggcttgccacagcttcggatacatactgatattagtgaagccaggcagggtgttgatctcgttgatcaccacttcgttctctggggttaaaaacacgtctacacgcgccatgcctgcgcatcccaacgtttgataagcctgaacggcaatcgcccggatcttatcgttgatttctggcgcaatggctgccggaactaccactttcgcgccatcttcgtcaatgtacttggtgtcgtaggcatagaaatcgctggtgagtacgatctctccacaggtgctggcttgcggattgtcgttgcccagaactgcgcattcgatctcacgacctttgatcccttgctcaacgatcactttatgatcgaactcgaacgccagatcgacggcaattgcgtactgttcttcactggttactttgctgacaccaacagaagagccctgattagccggttttacaaacagtggtaaccccagtttagactccacttcggcaaaactaatgttgtgacgattggcgcgcgtcagggtaataaatggcgcaatgttcagcccggcatcgcgtagcagacgtttggtgacatctttgtccatacaggctgctgaagccagaacatcagaacctacaaacggtaaattggcgacccgcagcattccctgcaaggaaccatcttcgcccagcgtaccgtggacaatcgggaaaatgacatccaccgtcggcaacggctgaccgttttgcgcgtcgataagctgatgctcatgtttacctggcacctgcgcaaggctggtcgccgaagggcgcaacgcaatatgggcaggatcgtctgcatttagcagataattgctggcatcgctgacgtgccattgcccttgtttatcaatgcccagcagcacaacgtcgaagcgacttttatcaatggcatcgacaatgttttttgccgattgcagagacacttcatgttccgctgatttaccaccaaaaacgattcctacccgcagtttttccatcttaaaaacctatcccgtctaacacaaagtgcatacattaccacgacaaaacgggggattcgcggccttctgaaagattgttgcaatcttctgctgacaaagcgtgcaacgtactggtgaagaaagtgcgttatctcaaagatgtgcgcaagatcacaaaaatgatgaacgggaagctaatttattcctggcttaaatggccatgcggtgagtttttttctcttaattataagttaacgaagagaatatatttcataacttttatttataataaaggttgataattaaaagcctatattttgtgtgggtaattatttaaataagagaaacgtttcgctggtaatcaaacaaaaaatatttgcgcaaagtatttcctttgtcataaaaataatacttccagacactatgaagttgtgaaacataatgttaacttctccatactttggataaggaaatacagacatgaaaaatctcattgctgagttgttatttaagcttgcccaaaaagaagaagagtcgaaagaactgtgtgcgcaggtagaagctttggagattatcgtcactgcaatgcttcgcaatatggcgcaaaatgaccaacagcggttgattgatcaggtagagggggcgctgtacgaggtaaagcccgatgccagcattcctgacgacgatacggagctgctgcgcgattacgtaaagaagttattgaagcatcctcgtcagtaaaaagttaatcttttcaacagctgtcataaagttgtcacggccgagacttatagtcgctttgtttttattttttaatgtatttgtacatggagaaaataaagtgaaacaaagcactattgcactggcactcttaccgttactgtttacccctgtgacaaaagcccggacaccagaaatgcctgttctggaaaaccgggctgctcagggcgatattactgcacccggcggtgctcgccgtttaacgggtgatcagactgccgctctgcgtgattctcttagcgataaacctgcaaaaaatattattttgctgattggcgatgggatgggggactcggaaattactgccgcacgtaattatgccgaaggtgcgggcggcttttttaaaggtatagatgccttaccgcttaccgggcaatacactcactatgcgctgaataaaaaaaccggcaaaccggactacgtcaccgactcggctgcatcagcaaccgcctggtcaaccggtgtcaaaacctataacggcgcgctgggcgtcgatattcacgaaaaagatcacccaacgattctggaaatggcaaaagccgcaggtctggcgaccggtaacgtttctaccgcagagttgcaggatgccacgcccgctgcgctggtggcacatgtgacctcgcgcaaatgctacggtccgagcgcgaccagtgaaaaatgtccgggtaacgctctggaaaaaggcggaaaaggatcgattaccgaacagctgcttaacgctcgtgccgacgttacgcttggcggcggcgcaaaaacctttgctgaaacggcaaccgctggtgaatggcagggaaaaacgctgcgtgaacaggcacaggcgcgtggttatcagttggtgagcgatgctgcctcactgaattcggtgacggaagcgaatcagcaaaaacccctgcttggcctgtttgctgacggcaatatgccagtgcgctggctaggaccgaaagcaacgtaccatggcaatatcgataagcccgcagtcacctgtacgccaaatccgcaacgtaatgacagtgtaccaaccctggcgcagatgaccgacaaagccattgaattgttgagtaaaaatgagaaaggctttttcctgcaagttgaaggtgcgtcaatcgataaacaggatcatgctgcgaatccttgtgggcaaattggcgagacggtcgatctcgatgaagccgtacaacgggcgctggaattcgctaaaaaggagggtaacacgctggtcatagtcaccgctgatcacgcccacgccagccagattgttgcgccggataccaaagctccgggcctcacccaggcgctaaataccaaagatggcgcagtgatggtgatgagttacgggaactccgaagaggattcacaagaacataccggcagtcagttgcgtattgcggcgtatggcccgcatgccgccaatgttgttggactgaccgaccagaccgatctcttctacaccatgaaagccgctctggggctgaaataaaaccgcgcccggcagtgaattttcgctgccgggtggtttttttgctgttagcaaccagacttaatggcagatcacgggcgcatacgctcatggttaaaacatgaagagggatggtgctatgaaaataacattactggttaccttgcttttcggtctggtttttttaaccaccgtcggcgctgccgagagaactttaaccccacaacaacagcgtatgacctcctgtaatcagcaggcgacggcgcaggcgttgaaaggggatgctcgtaagacctacatgagtgattgcctgaagaacagcaagtctgcgcctggcgaaaaaagtttgacgccacagcagcaaaagatgcgcgaatgcaataatcaagcaacacaacaatctctgaaaggtgatgatcgtaataagtttatgagtgcctgcctcaagaaagccgcctgatacctgatagtgctaacgggtgagctacgaaaatggctcacccgaaatatcatacttctgcctttagctccgtctctataatttgggaaaattgtttctgaatgttcccaaaaataatgaatgatgaaaactttttcaaaaaagcggcggcgcacggggaggaacctcctttaactcctcaaaacgaacatcagcggtccgggctgcgcttcgcccgtcgcgtcagactaccccgtgcggttggcctggctggcatgttcttaccgattgcttcaacgctggtttcacacccgccgccgggctggtggtggctggtgttggtcggctgggcgttcgtctggccgcatttagcctggcagatagcgagcagggccgtcgatccgcttagccgggaaatttacaacttaaaaaccgatgcagtattagcgggaatgtgggtaggcgtaatgggcgtaaacgtgctgccttccaccgcgatgttgatgattatgtgtctgaatttgatgggggcaggcggcccccgtctgtttgtcgcgggtctggtgttgatggtggtttcctgccttgtcaccctcgagctgacgggcattaccgtgtcgttcaatagtgcgccgctggaatggtggctctcccttcccattattgtcatttatcctctgctgtttggctgggtcagctaccagacggcaaccaaactggcggaacataaacgcaggttgcaggtcatgagtacccgcgacggcatgacgggcgtgtataaccgacgtcattgggaaactatgttacgcaatgaatttgataactgtcggcggcataatcgcgatgcaacgttactgattatcgatatcgaccatttcaagagcatcaacgatacctggggccatgatgtgggcgatgaagcgattgtggcgcttacccgacagttacaaattaccctgcgcggtagcgatgtgattggtcggtttggcggcgatgagtttgcagtaatcatgtccggtacgccagctgagagcgccattaccgccatgttacgggtgcatgaagggctaaatacattacgtttgccgaatacgccacaggtaactttacggattagtgtgggggttgcgccgctgaacccacaaatgagtcactatcgtgagtggttgaaatcggcagatttggcgctttacaaagcaaagaaagccggacgtaaccgcaccgaagtggcggcctgacgtccggcgaaagtcatcaggatttgctgagtttttctgatttttccatacacttcgtcatcgcttcgatcactgcagcacggaagcctttctcttccagtacgcgtaccgcttcaatggtggtgcctcccggtgagcagaccatatctttcagtgcccccggatgttctcccgtttccagcaccatttttgcggaacccattaccgcctgagcggcaaatttatacgcctgggcgcgtggcatcccgcccagcacggcggcgtcggccatcgcttcgataaacataaatacgtaggctggcgaagaaccgctcacaccgaccaccgggtggatcatcggctcagcaattacttccgcttcgccaaagcagcggaaaatattcagcacatcagcggtatcttctggggttaccagcgcgtttggcgttacggaggtcatcccggcattaaccagtgcgggagtgttcggcatggcgcggataattttccggtcatggcccagcgcgcgggcaagctggtcgagcgtgacacctgcagcaatagaaacgaccagagagtctttattcaggctggaggtgatttcgctaagcactttaatcatgatgccaggtttaacggcagcaaaaatgatgtcggcgatttgcgccacttcttgcgccgattctgcggcgttgatgccgaactggtcatgcagggcggcgactttatccggggagggggtgtatacccagatttgccctggaagcacctgaccgctggcaatcagaccgccgagaatggcttttcccatattgccgcagccaataaaaccgattttcttttccattgcctcactcctgccgtgaaattcattgttttgataatcgctggcagaagcataaacagaactatgccggaaggcaaaagcgcgacacaatagaggattacccaacaaaggatgactttatgacaatttgggtggatgccgacgcgtgtcccaatgtaattaaagagattttgtatcgcgcggcggaacgtatgcagatgccgctggtactggtagcaaaccagagtttacgcgtgccgccatcgcgatttattcgtacgctgcgcgtcgcggcaggtttcgacgttgccgataacgaaattgtccggcagtgtgaagcgggcgatttggtgatcaccgcagatatacctttggctgctgaagccatcgagaaaggcgctgcggcgcttaatccgcgcggcgaacgttacacgccagcgaccattcgtgagcgcctgacgatgcgcgattttatggataccttacgtgccagtgggatccagaccggcggaccagatagcctttcacaacgtgaccgccaggcctttgccgcggagctggagaagtggtggctggaagtgcaacgtagtcgtggctaaatgtaatttattatttacacttcattcttgaatatttattggtatagtaaggggtgtattgagatttttactttaagtggaattttttctttacaatcgaaattgtactagtttgatggtatgatcgctattctcatgacaccggctttcgccgcattgcgacctattggggaaaacccacgatgacacaacctctttttctgatcgggcctcggggctgtggtaaaacaacggtcggaatggcccttgccgattcgcttaaccgtcggtttgtcgataccgatcagtggttgcaatcacagctcaatatgacggtcgcggagatcgtcgaaagggaagagtgggcgggatttcgcgccagagaaacggcggcgctggaagcggtaactgcgccatccaccgttatcgctacaggcggcggcattattctgacggaatttaatcgtcacttcatgcaaaataacgggatcgtggtttatttgtgtgcgccagtatcagtcctggttaaccgactgcaagctgcaccggaagaagatttacggccaaccttaacgggaaaaccgctgagcgaagaagttcaggaagtgctggaagaacgcgatgcgctatatcgcgaagttgcgcatattatcatcgacgcaacaaacgaacccagccaggtgatttctgaaattcgcagcgccctggcacagacgatcaattgttgattttcgagcgcctatacttaacgttcatcccgtgaaataaggaagaacgatgccaacgaaaccgccttatcctcgtgaagcatatatagtgacgattgaaaaaggaaagccaggacagacggtaacctggtaccaactcagagccgatcatcctaaaccagactcgttgatcagtgaacatccgaccgctcaggaagcgatggatgcgaaaaaacgctatgaggaccctgacaaagagtgaccgcatcagactgctcggaagggattctgagtgccactacaagggatctgcgtcacatttttcataattcatgtttttctaataattagaatattaaacaataacaatccattactggaatcatttggaatctttacattatgccgtgcacgtctgctgctacgctttttgtcatttgtagcacaagtaagtgtcagcagtggtgcttcacacttgcccggtaattaacgacgaaagaaaagtaaggtggatgaacaatgagtgcgtcgttggcgatcctgaccatcggcattgtacctatgcaggaagttttgccgctcctgacggaatacattgacgaagataatatttcccatcatagcctgctggggaagttaagtcgtgaagaagtgatggcggagtacgcgccagaagcaggcgaagacaccattctcacattattaaatgacaaccagctggcccatgtttcgcgtcgcaaagtggagcgtgacctgcaaggtgtggttgaagtgctcgataatcagggttatgacgtcattttattaatgagtacagcaaacattagtagtatgactgcgcgtaatacgatctttcttgagctgtcgcgaatattgcctccactggtttcctctattgttgaagatcatcaggtgggggttatcgttccggttgaggagatgctgcccgttcaggcgcaaaaatggcaaattttgcagaaatcgccggtattttcattgggtaaccccattcatgattcagaacaaaaaatcattgatgccgggaaagaattactggcaaaaggggctgatgtcatcatgctggattgtttaggatttcaccaacgtcatcgcgatttactgcaaaaacagctcgatgttcctgtcttgctgtctaacgtattgattgcacggctggctgcggaattactggtgtaattttgcgtgacagccagcgcctctggcccctatagtgaagtagatgttcaactaccaaacagggccagtttatgcttcaaagtaatgagtacttttccggcaaagtgaaatcaatcggcttttccagcagcagcactggtcgcgccagcgtgggtgttatggttgaaggcgaatacaccttcagcaccgctgagccggaagagatgacggtaatcagtggcgcgctgaatgtgttactgcctgacgcgaccgactggcaggtgtatgaagccggttcggtgtttaatgttcccggtcacagtgagtttcatctgcaagttgccgaacccacctcttatctgtgccgctatctgtaattcctcgccttccccttgaacgggagggcatttttctgaaatatcctttctttagcccataataatatttcctttgctgcgattttttcaatttccgatatattcataatttatcaaggttgatataaatatcagtgaagatctccagatattgttgcggaactggctacgataaaagataaatcagatgatgaatggtggcgtgcattgctgcaaagtcgcaatgatcatttacgccaaacggcattgcgcaacgcacataccccggcgttgttgttaacgacattgactgagcctcaggatcggtcgctggctattaataatccacagctggctgccgatgtgaaaacggcgtggttaaaagaggatccatcattactcttatttgtcgaacaacccgatctttcgctgttacgtgatttagtgaaaaccggggcaacgcggaaaattcgcagtgaagcgcgtcaccggcttgaggaaaaacaatgacacaacgtccatggagcaagttacagcgtaaaacgcataatattgctgcgctaaaaattattgctcgccgtagcgaataattatatgcctggtgtggcttcgtacgccggataagacgcggcaggcgtcgcatccggcattaaaggaaaatcagcaattaacgttgtgcttcgccacctaatccttcaatcaggttttgaattaacgctgccagttcaccagtcatcaggatgaaatcggcatcaaaacgctgggcgaaatcttcacggtcgatatcttcgttttgatcgcgcagctcgtcgcagaacttcagacgcttgagcgaaccatcgtcgcacatcacaaactgaatgcgctgctgccagtcgagcgccagtttagtcaccacttttccggcttcaatgtgattggtgatctcttcgctggtcagatcttgtttcttcgcgcggatcacgccgccatcttccagcaacgatttcagctcggcttcatcaagcagctggaagccctgtgccgcactaccggagcgaacccattcggtcagcgtcagttcaatcgggttttccatgctcaatggtacaaccggtaacgaccccaggcttttacgcagtaatgccagcgtatcttccgcttttttggcactggcgcagtccaccataatcaaaccgttaaccgtgtcgatccacatcattgtctggctaaaacggctgaaagcacgcggcagcagagagtgcagcacttcgtctttcagcgaatctttttcggttttcttcagcttacgcgcctgttccgcttccagtttggcgattttcgcttccagcgcctgtttaatcaccggagacgggaggattttttcttctttgcgcgcgcagataacaatttgaccattggcaacgtgcgttaacgcatcgctgtgcgatcccatcggaggaacccagcccatcttcgccatgtcctggctgccgcatggggtaaatgccatcgaggctagctgtttttccatctcttctgcacgcagcgaaatctcgcggctaagacggtaaaccattaaatttttgaaccacagcatgataatttccacggccttgtcgttaaatttagcgggcatgataacgaattgtcggcggccttgcattgccaatccggttgtccgtctctacgctattgatattgaaaaaaataaggagagtaccgtgcgtataggtatcgatttaggcggcaccaaaactgaagtgattgcactgggcgatgcaggggagcagttgtaccgccatcgtctgcccacgccgcgtgatgattaccggcagactattgaaacgatcgccacgttggttgatatggcggagcaggcgacggggcagcgcggaacggtaggtatgggcattcctggctcaatttcgccttacaccggtgtggtgaagaatgccaattcaacctggctcaacggtcagccattcgataaagacttaagcgcgaggttgcagcgggaagtgcggctggcaaatgacgctaactgtctggcggtttcagaagcagtagatggcgcggcagcgggagcgcagacggtatttgccgtgattatcggcacgggatgcggcgcgggcgtggcattcaatgggcgggcgcatatcggcggcaatggcacggcaggtgagtggggacacaatccgctaccgtggatggacgaagacgaactgcgttatcgcgaggaagtcccttgttattgcggtaaacaaggttgtattgaaacctttatttcgggcacgggattcgcgatggattatcgtcgtttgagcggacatgcgctgaaaggcagtgaaattatccgcctggttgaagaaagcgatccggtagcggaactggcattgcgtcgctacgagctgcggctggcaaaatcgctggcacatgtcgtgaatattctcgatccggatgtgattgtcctggggggcgggatgagcaatgtagaccgtttatatcaaacggttgggcagttgattaaacaatttgtcttcggcggcgaatgtgaaacgccggtgcgtaaggcgaagcacggtgattccagcggcgtacgcggcgctgcgtggttatggccacaagagtaaaaaacgtaggcaattggcgcatcatgcctgatgcgacgcttgccgcgtcttatcaggcctgcaaaatgtgccagaaccgcgtagggcggataaggcgttcacgccgcatccggcaataagtaatgagcaccgagactataacctaccccagtggtttcgccagcaccggagtatccgccgcttgctggcgcttatagcgaccatacagcagcaacgacgacatcgcagcaaacgaaagcagggcggcaggcagcgccacgtaattatatgccagtcccagcgtcagcatcatacctccgcaatatgcgccgacggcgctaccgaggttaaacgctatttgcccacctgcggcacctaataactctccgcctttggcgttttgtagtaacaatatttgtagcggtgctgaaagggcaaataatcccgcgcaacaaataaaagcaaaaataagcgacgttgttttcatgccgccgcagaaaaagagcatcagcagtgccagtacaattataaagtcagtcactgctgcaatgcgcagtggtgaataacgtcctgaaatcctgccacttagcatatttcccagcaccatccctagcccaactaacatcataataaaggtcatcgccgtttccgaaaaaccggaaataaacatcatgtatggctttacgtagctgaaccaggcaaacacacctgcgttgccaaacatcgtggcggcgaaaattaaccacggggccgggctgcgcaaaaagtgaaattgttcgcgcagatttcctttcgcctcgtcgcgaatatctggcacccaaaaatagaccgatgccatcaccgcaatattaaaaacagcgatcaataaaaaggtgtaacgccagctaaattcctgacttaaatacgttcccagcggaatgcccagcaaattggcgactgtcatcccggaaaccatccccgccacggcggcggtgacttttccgggtttgataatttttgataacacgatcgctccgacgccaaaaaatgcgccatgcggaaagccggataccagccgaccaatggcgagcatcaggtaagacgaagagagcgtgaacatggcgttgccaatgacgcacaacgccaccagaaacaacaagatatgtttgagtgagtagcggctggaaaagagtgcgatgattggcgcaccgaccaccacccccagtgcataatacgagatcatatgcccggcggcaggaatcgaaattcctacgttatgcgccagctccgtgagcacgcccataatgccaaattcggccatccccaaaccaaacgtgcccagagccaaagataaaatgacttttttcataccaccatcacaaccaccagaacggctaccaatcaccgtagccaataaagtgatagcttgcaggataacgaccagcaaggccaagagataattcgcccctctgtattcattatcctgctgaatagttatttcactgcaaacgtactttccagtttgctgtagcccaggccgttgatctttttcactttgatctgcaccggaatacgctctttcatcgcttctacgtggctaatcacaccgatggttttgccactggcgttcagggcatccagcgcatcaagggcggtatccagcgtttcgctatccagcgtgccaaaaccttcatcaaggaacagcgagtcaatacgtgttttatggctgaccagatccgaaagcgccagcgccagcgccagactaacgaggaaactttcgccgccggaaagggtacgggtatcgcgtaccgcatctgcctgccaggtatcaacaacctcgacttccagcgcctcgctggctttgcgctgtaacagatagcgcccgtgcagccgggtaagttgctgattagcgagatggactaaattatccagcgtcagcccctgggcaaacttgcggaatttatcgccctctttggaacctattagcgaattcagatatccccagtcctcaacctgctgcgtcatttgagcaatttgctgcattaaggtttgttgttgctgacggttatctgcatcctgcttcagctgctggcgaatctcgccttgactcgtggtgttttcacgcaacttttggtgagtttgcgctaactcttgctgaatctgctccaccgtcacagtgagagccaacccgtcgtcaggtcggtgttgttgatgctgtgccagcgtttctgctgtctgagtgaccagagtttgcgcctgacggcgctggttttccagattctgcttgagctgttccagctgcgttagtgtttgttcatccattagcgccgcaaggaacgcctgctgatcgtcaaagacgctggcctgtagcgcggtgtcaaactgcgcctgggctttttgcagactttgcgccgccagaacatcctgttgctgtaacgtctgctgctggctgtgtaatgcgagacattgttcatgtacctgccgccagttttccaataccacagtttcttcgcagtgcgggagttcatcactttgcggcaacgtttccagaatcggcgtcagctgctgaatacggttttgcagcgcggttaattcgttctggcgttgctgccagctctgcgcttcttgctgacgtgtcgccaaccagctctcttcttcatcttcctgtggcaatgtcagtgcataacccgtcaatgtcgttaaaagtagttgctggcgttgttcaatttgctgttgatactggataatttgctgattatgcgcggcaatctgcccttgtaattcatgccgttggctgagtaaccgcagctggcgttcgtgctcatcttgtgcatccagccacggttgaatatcgtccagtggctgcaaggtgatattgaggctggccgtgacggcttgccattgttgagtaagtgcttgctcatcttgtcggaggctttgcgcttcgttttcatcacgctgaagctgctttgttatggcgtccagttgcccacgtagcgtcgcaccttcttcaccgagctttttaacttcgttttccagcgccagtaatcgagactgattaacgccaggctccagcgcctgatacgcctcgaccgccgggtggctggtggaaccacaaagtgggcaaggctgacccgcctgtaactgtgcacgttgagcttccagcgttttgatgcgcgcttcctgctcgcaaatggttttcacatcggcaagttgctgcgtcttttctttataacgctggcgcatttcgttaagtgcggcgttacgttgcgtctgttcttgcgtgacattctggatagcgacctgtaactgcgccagacgtttttgttggggaacaatctgtccatgcagcgcgaccaggtgctgacgcagtgggcgttgctcagcatgttgcgccagggcggtagcaacttcatcggcggttaacgtcaacgtgatcgccgcaagcgcattaagtttttgctcagcatgggttaactgttgctgccattgccgcagatgctcgcgatcgctggtttgttgggagaactgcgcacgccaacccgccggttcgttgttccactgacggaagcggtcgtgttcctgtaaccaggtattcaggctttgttgctgctgctgtaattctgctgactgcttcgccgcgtggtggcgaatgctcgcgcgaagcgccattgtgctctgtaagcgagtatttacttcttcaatctgctggcgaatatgcgccagcgccgcgctgtgttctgcgatgcgttcccagtgtggacgaagatttcgtgccggttgtgccagactaagcgccgccagttgaggttgcgctttttcttcttcggctaacgcctgttgcaaggcctgctgacggcggctggcttcttgctgcaattcgtcctgacgcgttaaccagtttagcgattgttgttcttgctgctgcgcggtaattaactgtttttcttcgtcagtaagtacctgcaaactcgctgtcagcgattgcacttgttccggcgtgagcaacgtgacgccgctggcctgcgcttgcagcttctccagctctgtgcgggccgatttgtgctgctcaaaaaccatcgccgagatttgcccgtagatttcagtgccggttaactcctcgagcaattccgcgcgttctttgggtttggcattcaggaaggcagcaaattgcccctgcgaaagcagcatcgaacgggtgaagcgcccgtaatccagcccggttaacgtcgctgtcagttccagcttatctttcactttgtcggcgagaattttgccgtcggcgcagcgcgccagctctacgcgtggcacctgcaaattaccgtcgggttggttacgcgcccgattctggctccagaatgcacggtacgcttcacctttcacttcaaactccacctccgccagacattcggcggtatcgcgggtcatgagatcattttgcgattgtgaaacgttagagagacgcggagtttcgtgatacagcgccagacaaatggcgtccagcagggtggttttccccgcacctgttgggccggtaatagcaaacagcccgttgctggcgaacggctcgcgggtgaaatcaatcttccattcgccttttaatgagttcaggtttttcaggcgcaggctgagaattttcatgcttcgtgttctccggcgagggtatgcaacgtcgtggtgaaaagatgctgcagacgttgctgctgcgattcatccagttcttccagtgccagacggcgattgaacacctcttcgacgctgagttcgctgagggtttcacgctgttggctggctaacacacgctcgcgctgttcacgactccgacgtaccagcaatacttcgacaggcaatgattcggttaatgcctggattttgcgctgaatatcatgcagatactcatcagtagtgatttcgatatccagccagacaggtggctcctgcgatacatcgcgccactgttccagctgtgcggtaatcgacgccagatcgcctttcagcactgccatgggttgcgttaccggtacgttcaggttttccacgctctctaatttgccgtttgaaaatgtcaccagatggacatatttactcttaccgcattcatcaaaactcagtggaatgggggagccgcaatagcgaacatgttccatgccgccaataatctgtgcgcggtgaatatgcccgagcgcgatgtagtcggctggtggaaagttttgtgccggaaacgcgtccagcgtgccaatataaatgtcacgcacggcgtcacttttactggcccccacggtcgttaaatgtcccgtggcgatgatgggcagaggctgatcgccgcgcagtttgcaggcatcggcatagtgttgttggtaataatcggtaatcgctgccagtaaatgctgctgtttttcaataccgttaagccccgcctggctggtaataatgtcacgcggacgtaaaaacggaatggggcacagcactgcgcctggcgtcccgtcgcgacgaggcaagatttgcggcgcatgtccggcgctggcgaccacggtagtattgaggaacgccatgatatcgcgcgattcattcagcgtggcgaccgagtcatggtttcctgccagtaccaccagatgacagccagtttgctgtaaattgacaacaaaacggttgtataacgtgcgggcgtaactgggcggcgagccggtatcgaaaacatcaccggcaacaataatcgcatccacctgatgggtttgtgctgtctccagcagccagtcaagaaaagcctgatgttcagcttcgcggcttttactgtagaagttctggccgagatgccagtctgaggtgtgaaggatgcgcataacggttccctggcgaaaaagcatgggcgcgattatacccaaacagatgtgccatttgcttttttctgcgccacggaaatcaataacctgaagatatgtgcgacgagcttttcataaatctgtcataaatctgacgcataatgacgtcgcattaatgatcgcaacctatttattacaacagggcaaatcatggcgagacgtattctggtcgtagaagatgaagctccaattcgcgaaatggtctgcttcgtgctcgaacaaaatggctttcagccggtcgaagcggaagattatgacagtgctgtgaatcaactgaatgaaccctggccggatttaattctccttgactggatgttacctggcggctccggtatccagttcatcaaacacctcaagcgcgagtcgatgacccgggatattccagtggtgatgttgaccgccagaggggaagaagaagatcgcgtgcgcggccttgaaaccggcgcggatgactatatcaccaagccgttttcgccgaaggagctggtggcgcgaatcaaagcggtaatgcgccgtatttcgccaatggcggtggaagaggtgattgagatgcagggattaagtctcgacccgacatctcaccgagtgatggcgggcgaagagccgctggagatggggccgacagaatttaaactgctgcacttttttatgacgcatcctgagcgcgtgtacagccgcgagcagctgttaaaccacgtctggggaactaacgtgtatgtggaagaccgcacggtcgatgtccacattcgtcgcctgcgtaaagcactggagcccggcgggcatgaccgcatggtgcagaccgtgcgcggtacaggatatcgtttttcaacccgcttttaacgccttgctcatcggacgcagagcagggcttatgatttcttaactggagtatcttacgtgctggaacggctgtcgtggaaaaggctggtgctggagctgctactttgctgcctcccggctttcatcctgggtgcattttttggttacctgccctggtttttgctggcatcggtaacaggactgcttatctggcatttctggaatttattgcgcctttcatggtggctgtgggtggatcgcagtatgaccccgccaccggggcgtggtagctgggaaccgctactatacggcttacaccagatgcagctgcgaaataaaaaacgccgccgtgaactgggcaatctgattaaacgctttcgtagcggcgcggagtcgctgcccgacgcggtggtgctgaccacggaagagggcggtattttctggtgtaacggtctggcgcaacaaattcttggtttgcgctggccggaagataacgggcagaacatccttaacctactgcgttacccggagtttacgcaatatctgaaaacgcgtgatttttctcgcccgctcaatctggtgctcaacaccgggcggcatctggaaattcgcgtcatgccttatacccacaaacagttgctgatggtggcgcgtgatgtcacgcaaatgcatcaactggaaggggcgcggcgtaacttttttgccaacgtgagccatgagttacgtacgccattgaccgtgttacagggttacctggagatgatgaatgagcagccgctggaaggcgcggtacgcgaaaaagcgttgcacaccatgcgcgagcagacccagcggatggaaggactggtgaagcaattgctgacgctgtcgaaaatagaagccgcaccgacgcatttgctcaatgaaaaggttgatgtgccgatgatgctgcgcgttgttgagcgcgaggctcagactctgagtcagaaaaaacagacatttacctttgagatagataacggcctcaaggtgtctggcaacgaagatcagctacgcagtgcgatttcgaacctggtctataacgccgtgaatcatacgccggaaggcacgcatatcaccgtacgctggcagcgagtgccgcacggtgccgaatttagcgttgaagataacggaccgggcattgcaccggagcatattccgcgcctgaccgagcgtttttatcgcgttgataaagcgcgttcccggcaaaccggcggtagcggattagggttagcgatcgtgaaacatgctgtgaatcatcacgaaagtcgcctgaatattgagagtacagtaggaaaaggaacacgtttcagttttgttatcccggaacgtttaattgccaaaaacagcgattaatccgcctttgtcatcttttattgccataagccagtcgatgctggcttattttctttgcagtcaaaatacgggcgttagattttacaacggttggtgattttttgttcgcatgattagccatgtctttttcacggaaatagtgttttatactggttggtgatttcttatcgctatatacctctggtttttagatccctccttgctttaaaacgttataagcgtttaaattgcgcttcaggtgctgtcatactgactgcattaacgcggtaaatcgaaaaactattcttcgccgcgcctggttgggagtatttcccgctaaaattgtttaaatataccgctgtatcatccccagggattggcacaaaaatttaacgttacaacaccacatccacaggcagtatgatttatgacccatcaattaagatcgcgcgatatcatcgctctgggctttatgacatttgcgttgttcgtcggcgcaggtaacattattttccctccaatggtcggcttacaggcaggcgaacacgtctggactgcggcattcggcttcctcattactgccgttggcctgccggtattaacggtagtggcgctggcaaaagttggcggcggtgttgacagcctcagcacgccaatcggtaaagtcgctggcgtactgctggcaacggtttgttacctggcggtggggccgcttttcgctacgccgcgtacagctaccgtttcctttgaagtggggattgcgccgctgacgggtgattccgcgctgccgctgtttatctacagcctggtctatttcgctatcgttattctggtttcgctctatccgggcaagctgctggataccgtgggcaacttccttgcgccgctgaaaattatcgcgctggtcatcctgtctgttgccgctattgtctggccggcgggttctatcagcacggcgactgaggcttatcaaaacgctgcgttttctaacggcttcgttaacggctatctgaccatggatacgctgggcgcaatggtgtttggtatcgttattgttaacgcggcgcgttctcgtggcgttaccgaagcgcgtctgctgacccgttataccgtctgggctggcctgatggcgggtgttggtctgactctgctgtacctggcgctgttccgtctggggtcagacagcgcgtcgctggtcgatcagtctgcaaacggcgctgctattctgcatgcttacgttcagcacacctttggcggcggcggtagcttcctgctggcggcgttaatcttcatcgcctgcctggtaacggcagttggcctgacctgtgcttgtgcagaattctttgcccagtacgtaccgctctcttatcgtacgctggtgtttatcctcggcggcttctcgatggtggtttctaacctcggcttaagccagctgatccagatctccgtaccggtgctgaccgctatttatccgccgtgtatcgcactggttgtattaagttttacacgctcatggtggcataattcgtcccgcgtgattgctccgccgatgtttatcagcctgctttttggtattctcgacgggatcaaagcatctgcattcagcgatatcttaccgtcctgggcgcagcgtttaccgctggccgaacaaggtctggcgtggttaatgccaacagtggtgatggtggttctggccattatctgggatcgcgcggcaggtcgtcaggtgacctccagcgctcactaaatcactgaacatttgttttaaccacggggctgcgatgccccgtggttttttattgtgttgatgggttaggaattgatggaaagtaagaacaagctaaagcgtgggctaagtacccgccacatacgctttatggcactgggttcagcaattggcaccgggctgttttacggttcggcagacgccatcaaaatggccggtccgagcgtgttgttggcctatattatcggtggtatcgcggcgtatatcattatgcgtgcgctgggggaaatgtcggtacataacccggccgccagctctttctcgcgttatgcgcaggaaaacctcggcccgctggcaggttacattaccggctggacctactgctttgaaatccttattgtcgccatcgccgatgtgaccgcttttggtatctatatgggtgtctggttcccgacggtgccgcactggatttgggtactgagcgtggtgctgatcatttgcgccgtaaacctgatgagcgtgaaggtattcggtgagctggaattctggttctcgttctttaaagtcgccaccatcatcatcatgattgtcgccggtttcggcatcatcatctgggggattggcaacggcgggcaaccgaccggtattcataacctgtggagcaacggcggcttcttcagtaacggctggcttggcatggtaatgtcgttgcaaatggtgatgtttgcttacggtgggatcgaaattatcgggattaccgccggtgaagcgaaagatcctgagaaatcgataccgcgtgcgattaactccgtgccgatgcgtattctggtgttctacgtcggtacgctgttcgtcattatgtctatctacccgtggaatcaggttggcactgccggtagcccgttcgtgctgacgttccagcatatgggcattacctttgccgccagcattcttaactttgttgtgctgactgcttcgctgtcggcaattaacagtgatgtatttggcgtaggccgtatgctccacggtatggcagagcagggcagcgcgccgaaaattttcagcaaaacgtcgcgtcgcggtattccgtgggttacggtgctggtgatgactaccgcgctgctgtttgcggtgtatctgaactacatcatgccggaaaacgtcttcctggtgatcgcttcgctggcaaccttcgccacggtgtgggtgtggattatgatcctgctgtcgcaaattgccttccgtcgccgtttgccgccagaagaagttaaggcgctgaaatttaaagtgccgggtggggtagcaacgaccatcggcgggctgattttcctgctctttattatcgggttgattggttatcacccggatacgcgtatctcgctgtatgtcggtttcgcgtggattgttgtgctgttgattggctggatgtttaaacgccgccacgatcgtcagctggctgaaaaccagtaatccttgcgttctgtaagccggttcaggaggaaatcctgatccggctattccgaaagttatccgcccccgtcctcctcccccaaatatccttcagatgatgagtgatcctgcattaggctatggcaaggtgatcagattttcatcacaggggaattatgatgttaaatgcatggcacctgccggtgcccccatttgttaaacaaagcaaagatcaactgctcattacactgtggctgacgggcgaagacccaccgcagcgcattatgctgcgtacagaacacgataacgaagaaatgtcagtaccgatgcataagcagcgcagtcagccgcagcctggcgtcaccgcatggcgtgcggcgattgatctctccagcggacaaccccggcggcgttacagtttcaaactgctgtggcacgatcgccagcgttggtttacaccgcagggcttcagccgaatgccgccggcacgactggagcagtttgccgtcgatgtaccggatatcggcccacaatgggctgcggatcagattttttatcagatcttccctgatcgttttgcgcgtagtcttcctcgtgaagctgaacaggatcatgtctattaccatcatgcagccggacaagagatcatcttgcgtgactgggatgaaccggtcacggcgcaggcgggcggatcaacgttctatggcggcgatctggacgggataagcgaaaaactgccgtatctgaaaaagcttggcgtgacagcgctgtatctcaatccggtgtttaaagctcccagcgtacataaatacgataccgaggattatcgccatgtcgatccgcagtttggcggtgatggggcgttgctgcgtttgcgacacaatacgcagcagctgggaatgcggctggtgctggacggcgtgtttaaccacagtggcgattcccatgcctggtttgacaggcataatcgtggcacgggtggtgcttgtcacaaccccgaatcgccctggcgcgactggtactcgtttagtgatgatggcacggcgctcgactggcttggctatgccagcttgccgaagctggattatcagtcggaaagtctggtgaatgaaatttatcgcggggaagacagtattgtccgccactggctgaaagcgccgtggaatatggacggctggcggctggatgtggtgcatatgctgggggaggcgggtggggcgcgcaataatatgcagcacgttgccgggatcaccgaagcggcgaaagaaacccagccggaagcgtatattgtcggcgaacattttggcgatgcacggcaatggttacaggccgatgtggaagatgccgccatgaactatcgtggcttcacattcccgttgtggggatttcttgccaataccgatatctcttacgatccgcagcaaattgatgcccaaacctgtatggcctggatggataattaccgcgcagggctttctcatcaacaacaattacgtatgtttaatcagctcgacagccacgatactgcgcgatttaaaacgctgctcggtcgggatattgcgcgcctgccgctggcggtggtctggctgttcacctggcctggtgtaccgtgcatttattacggtgatgaagtaggactggatggcaaaaacgatccgttttgccgtaaaccgttcccctggcaggtggaaaagcaggatacggcgttattcgcgctgtaccagcgaatgattgcgctgcgtaagaaaagtcaggcgctacgtcatggcggctgtcaggtgctgtatgcggaagataacgtggtggtatttgtccgcgtgctgaatcagcaacgtgtactggtggcaatcaaccgtggcgaggcctgtgaagtggtgctacccgcgtcaccgtttctcaatgccgtgcaatggcaatgcaaagaagggcatgggcaactgactgacgggattctggctttgcctgccatttcggctacggtatggatgaactaacgttttataacgccttgcgtgacgcctgcgccatcatccgcggataaaactgccagaagcgggtttcgagggcgtcataatgagcgtctaaatcgtaccaggagtcacgcagggcatccagacgtgggcggcggcttgccatgccgtttaacacgttctggatgaaatccatatcgcgatagcgcaccagccactgctctgaccacaagtaattgttcagattgataaaacgtggcggtgagtccggcaaaatcgtcatcacttgctcgcgggcataacagacaaattcctgtagcggaaagtccggcgacagctgcgaccagtggcgggaaagaaagtgatcccacatgacatccagcgtaataggcgcaacgcggcgcgtttcactacgaaaccactcccgtgcttcgcggacttccggcagattgtcagtcaatacgtcgatacgtcgatgcatatgaatgccagccacgacgtcgggcggaaaactttcttcaggatttccgcgtacgaaatcagccagtaaattgccggaaagcgagctttccgcgagatgggctaaatgcaggtgagctaaaaaattcatcgattatattctatccaaaagggggtaaaggttgcagggagagcgccccggcactagactacccgcctcttattttagtctgagtcagtgtcatgcgcgttaccgatttctcctttgaattgcccgaatccctgattgcccactatcccatgcctgaacgcagtagctgtcgtttactgtcgctggacgggccgacgggcgcgctgacgcacggtactttcaccgatttacttgataagctcaaccccggcgatcttctggtttttaataatacccgcgtgatcccggcgcgcctgtttgggcgtaaagccagcggcggcaagattgaagtgctggttgaacggatgctcgacgacaaacgcattcttgcgcatattcgcgcctcgaaagcgccaaaacctggcgcagaactgctgctgggcgatgacgaaagtattaacgcaacaatgaccgcgcgccacggcgcactgtttgaagtcgaatttaatgatgaacgctcggtgctggatattctcaacagcatcggccatatgccgctgccgccgtatatcgaccgtccggacgaagacgctgaccgcgaactttatcaaaccgtttatagcgaaaaaccgggcgcggttgcagccccgaccgcaggtctgcattttgacgagcctttgctggaaaaattgcgcgccaaaggcgtggagatggcgtttgtgacgttgcacgttggtgcgggcaccttccagccggtgcgcgtcgacaccattgaagatcacatcatgcactcggaatacgctgaagtaccgcaggatgtggtagacgcggtactggcggcgaaagcgcgcggtaaccgggtgattgcggttggcaccacttcagtacgttcgctggaaagcgcggctcaggcagcgaaaaacgatctcattgaaccgttcttcgacgatacccaaatctttatctatccgggcttccagtacaaagtggtcgatgcgctggtgacgaacttccacttgccagagtcgacgctgattatgctggtttcggcctttgccggttatcaacacaccatgaacgcctataaagcagcggtagaagagaaatatcgcttttttagttacggtgatgcgatgtttatcacgtacaatccgcaggcaattaatgagcgcgtcggggagtaattccgcggcgctggtttaaaacgttggactgtttttctgacgtagtggagaaaaaatgaaatttgaactggacaccaccgacggtcgcgcacgccgtggccgcctggtctttgatcgtggcgtagtggaaacgccttgttttatgcctgttggcacctacggcaccgtaaaagggatgacgccggaagaagttgaagccactggcgcgcaaattatcctcggcaacaccttccacctgtggctgcgcccgggccaggaaatcatgaaactgcacggcgatctgcacgattttatgcagtggaaggggccgatcctcaccgactccggcggcttccaggtcttcagccttggcgatattcgtaaaatcaccgaacagggcgtgcacttccgtaacccgatcaacggcgatccgattttcctcgatcctgaaaaatcaatggagattcagtacgatcttggttcggatatcgtcatgatctttgatgagtgtacgccgtatcctgctgactgggattacgcaaaacgctccatggagatgtctctgcgttgggcgaagcgtagccgtgagcgttttgacagtctcggaaacaaaaatgcgctgtttggtatcatccagggcagcgtttacgaagatttacgtgatatttctgttaaaggtctggtagatatcggttttgatggctacgctgtcggcggtctggctgtgggtgagccgaaagcagatatgcaccgcattctggagcatgtatgcccgcaaattccggcagacaaaccgcgttacctgatgggcgttggtaaaccagaagacctggttgaaggcgtacgtcgtggtatcgatatgtttgactgcgtaatgccaacccgcaacgcccgaaatggtcatttgttcgtgaccgatggcgtggtgaaaatccgcaatgcgaagtataagagcgatactggcccactcgatcctgagtgtgattgctacacctgtcgcaattattcacgcgcttacttgcatcatcttgaccgttgcaacgaaatattaggcgcgcgactcaacaccattcataaccttcgttactaccagcgtttgatggcgggtttacgcaaggctattgaagagggtaaattagagagcttcgtaactgatttttaccagcgtcaggggcgagaagtaccacctttgaacgttgattaatattaataatgagggaaatttaatgagcttttttatttctgatgcggtagcggcaacgggtgcaccggcgcaaggtagcccgatgtctttgattttgatgctggtggtattcggtctgattttctatttcatgatcctgcgtccacagcagaagcgcaccaaagaacacaaaaagctgatggactccattgccaaaggtgatgaagttctgacgaacggtggcctggttggtcgcgtaaccaaagtagcggaaaacggctacattgctatcgcgctgaatgacaccactgaagtagttattaaacgtgacttcgtagctgccgtcctgccgaaaggcaccatgaaggcgctgtaattaaaatttttccctaagggaattgccgtgttaaaccgttatcctttgtggaagtacgtcatgctgatcgtggtgattgtcatcggtctgctgtatgcgcttcccaacctgtttggtgaggatccggctgttcagatcactggtgcgcgcggagtcgccgccagtgagcaaacgctgatccaggtccagaaaacgttacaagaagaaaaaataactgctaagtctgtggcactggaagagggcgctattcttgcgcgcttcgactccactgacacccagttgcgcgctcgtgaagcattaatgggcgttatgggtgacaaatacgtcgtggcgcttaaccttgccccggcaacgccgcgctggctggcagctattcacgctgagccgatgaagctcggccttgacctgcgtggcggcgttcacttcctgatggaagtggatatggacaccgcgcttggcaaactccaggaacaaaatatcgatagcctacgcagtgacctgcgcgaaaagggcatcccgtataccactgttcgtaaagaaaacaactacggcctgagcatcactttccgcgatgctaaagctcgtgatgaagccattgcgtatctgagcaagcgccatccggacctggtgattagcagccagggcagcaaccagctgcgtgcggtaatgagcgatgctcgtctgagtgaagcgcgtgaatatgcggtgcagcagaacattaatatcctgcgtaaccgtgtaaaccaacttggcgtggcggagccggtggttcagcgtcagggtgctgaccgtatcgttgttgaactgccaggtattcaggacactgcgcgtgcgaaagagattctgggtgcgacggcaacgctggaattccgtctggtaaacaccaacgttgaccaggccgctgcggcatccggtcgcgtaccgggcgactctgaagtgaaacagacccgcgaaggtcagccagttgtgctgtacaaacgcgtaattctgaccggtgaccatatcaccgactccacttccagccaggacgaatacaaccaaccgcaggttaacatctcgctcgatagcgctggtggtaacatcatgtctaacttcactaaggacaacatcggcaaaccgatggcaaccctgtttgtggagtacaaagacagcggtaagaaagatgcaaatggtcgtgcggttctggtgaaacaggaagaggtgattaacatcgccaacatccagtctcgtctgggtaacagcttccgtatcaccggcatcaacaacccgaacgaagcccgtcagctgtcactgctgctgcgtgccggtgcgttgatcgcgccgattcagattgttgaagaacgtaccattggcccaaccctgggtatgcagaacattgaacaggggctggaggcttgccttgccggtctgctggtttctattctgttcatgatcatcttctataagaagtttggtctgattgcgaccagtgctctgattgccaacttgatcttaatcgtcggcattatgtcgctgttgccaggcgcaacgctgagtatgccaggtatcgcgggtatcgtcttaacccttgcggtggcggtcgatgcgaacgtactgatcaacgaacgtattaaagaagagttgagcaacggacgtactgttcaacaggcaattgatgaaggttatcgtggcgcattcagttctatcttcgatgcgaacatcaccacgctgattaaagtcatcatcctgtacgcagtgggtaccggggcaattaaagggttcgcgattactaccggtatcggtgtggcgacgtcgatgtttaccgcgattgtcggtacgcgtgccatcgtaaacctgctatatggcggcaagcgcgtcaagaagctgtcaatctgaggagtgcgatgtggcacaggaatatactgttgaacaactaaaccacggccgtaaagtctatgactttatgcgctgggactactgggctttcggcatctctggtctgctgttaatcgctgctatcgttattatgggcgtgcgcggctttaactgggggctggatttcaccggtggtacggttattgaaattacgctcgaaaaaccggctgaaattgacgtaatgcgtgatgcattgcaaaaagccggttttgaagagccgatgctgcaaaactttggtagcagccatgacatcatggtccgtatgccgcctgctgaaggcgaaaccggcggtcaggtgttgggcagccaggttctgaaggtgattaacgaatccaccaatcagaatgcagcagtgaagcgtattgagttcgtcggtccgagcgtgggggcagaccttgcgcaaaccggtgcgatggcgttgatggcagcgctgctgtctatcctcgtgtacgtaggtttccgctttgagtggcgactggcggcaggggtggttattgcgctggcgcacgacgttatcattacgctgggtattttgtcgttattccatatcgagattgacctgaccattgtggcatcgttgatgtcggttatcggttactcgcttaacgacagtatcgtggtatcggaccgtattcgtgaaaacttccgcaagatccgtcgcggtacgccttacgaaatctttaacgtgtccttgacccagacgctgcaccgtaccttgatcacatccggtactaccttgatggttatcctgatgctgtacctcttcggtggtccggtactggaaggcttctcgctgaccatgcttatcggtgtttccatcggtactgcatcttccatctatgtggcatctgcgttggctctgaaactgggtatgaagcgcgaacacatgttgcagcagaaagtggaaaaagaaggggcggatcagccgtcaattctgccgtaatcaagttcccgttgatgttgaaaatcccggtcagaagatcgggattttttttgatgtatggagattgcgaaaatccccgcatcttgggaaactgcgcgtaaccctacatttcatccaggtaacttttcatggctatcatcccaaaaaactatgcgcggttagaaagcggctatcgcgaaaaagcattaaaaatctatccgtgggtctgcggtcgctgttcccgcgagtttgtttattccaacctgcgtgaacttaccgttcaccacattgatcacgaccataccaataacccggaagatggcagtaactgggaattgttgtgtctctattgccacgatcatgagcattcgaaatataccgaagcggatcagtatggtacgaccgttatcgcaggggaagatgcgcagaaagatgtcggtgaagcgaagtacaacccattcgctgacctgaaagcgatgatgaacaagaagaagtgattaaaacgtaaaattgcctgatgcgctacgcttatcaggcctacgttatttcagcaatatattgaatttacgtgcttttgttggccggacaaagcgtttacgccgcatccggcatgaacaaagcacacgttgttaacaatcagaaatgccgggaataaatcccggcattttcataatcagaagttgtaacctactaccaggtaaccaccccagccggtagagcgaacgttgaagttgccgttgccgaagttcagttctgcatcgtcgttccactgaccaccgtcgtgccagtaacgagctacgacagagtagtgccagtgatcgtagttcagagccagaatatggctggaagcgatagagttattagtacgggtcttaataccgttgattgcgttaccgctgtcatcccctaaatcggaaccccagtcgaagttggtgaagccgatgtagctcagctgaccgccccacagatcggtaatcggcacaaagtatttaattttgaaacggtaaccgtcccactcgttttcgttcgctgcgccatagttctgccactggtatttcgcatagacgttcatggacaggctcatcggcaggccagtgtcgatatcggtacccagacccatgtaccaggtgctctggcgaccatctttattacgacccatgtcgtaaatgtagttgttcgcgaagtaccactctttgaacggaccgaagctaaggtcagtattggtcagcttgtcgatggagaaacgtggttcgatttccataaacagcggagaaccgtggttccagatacctttagcatcggagttaccgccgaagaataccggcgcatccgcataaccatagaagtcgaaccagtcttttttagcgaatgcttcgtactcaaggtaggtatcgttgcggatctgcggtccgaaacgggtgtgatagcttccgacaacgttaacgctctggtgccaccagtcggaaagatactgcggtttgtcgttttcagctgcgttgacagtaaaagacgaagagagcccagtaccgcaccggctgccagtaatgtttttttcatatgtatgccactgtttgaaaatcccttgcgggagtgaaaaaggcgcaaattgcgtttctaaatatttcgtatacagaggagcctattataaaaatcattgctcacaaaaatatgtttcgtttcacagttctatcatttacgtaatcgattgcgttcacgtttacacacattcgggcggggattgtactgactttcgcccttgttgcaaacttttactatcaatccaggtgatgtaagcagagtaacaaaatgacggggaaagatgttgcgggacgcacaaaatcgtcccgaaatacgtttactgcataacaggttgaatgtcgtggatacgtacaaagcctaactgatccacagaaatcccctttaactgtaacggaatatcaacatcgctgggggcgaggacgctggcaggggcattaatcaattgattctgcacattgatttcctgaaagttgtctattgttccctgaatttgcccatattcaacagttccgctgaatgcgggcaagggatcattcgactcaccctgaatacgtagtgtaagggtggtgccatctgcatcaggcgtaatattcaccagcgacatacgtaaagtaccgatctggctttccagtcttgccggtgttttcgctccaggcagaaggtaaaccccactgctggattttgcattcagcctgttttgctgagtgattttgactgtttcttgattgagttgcgtcatctcctggttcagcgtgctgacgctgtgtttcatctgtcgcacttcactttgctgcacacaggcgctaaggctgaacaggcttcccagcaggagcagtcgaaaaacgttagtattcataggtcgtccctttctcgtcgcaattagcctaatggtagagggtaaaagcagcgaaagcatcgatcctttatctcaaaagcgttgcgcctttgttgtatcgtcagttcagggtaaaatagatttccgttaaccacctggtcaggacgccgtatgcattgcccattctgtttcgccgtggacactaaggtaattgactctcgtctcgtgggcgagggttcatccgtacgccgccgtcggcagtgtctggtgtgtaatgaacgtttcaccacctttgaagtggcggagctggttatgccgcgtgttgtaaaaagcaacgacgtgcgtgaaccgtttaatgaagagaaattgcgtagcggaatgctgcgggcgctggaaaaacgtccggtgagttccgatgacgtcgaaatggcaatcaatcatattaaatcgcagctgcgcgccaccggtgagcgcgaagtgccgagcaagatgattggcaatctggtgatggagcaattgaaaaagctcgataaagtcgcctatatccgttttgcctctgtctaccgcagtttcgaagatatcaaagaatttggcgaagagatcgcgcgcctggaggactaagccgtgcaggacgagtattacatggcgcgggcgctaaagctggcgcaacgaggacgttttaccacgcatcccaacccgaatgtcgggtgcgtcattgtcaaagatggcgaaattgtcggtgaaggttaccaccaacgtgcgggtgaaccacatgccgaagtacacgcgttgcgtatggcgggtgaaaaagccaaaggtgcgaccgcctatgtcacactcgaaccctgtagccatcatggtcgtacgccaccgtgctgtgacgcactcatcgccgctggcgtagcgcgcgtggttgcctcgatgcaagatcctaacccgcaggtcgctgggcgtggactttaccgtctgcaacaggctggcattgacgtcagccacggcctgatgatgagtgaagccgagcaattgaataaaggctttctcaagcggatgcgcaccggctttccttatattcagttaaaacttggcgcatcgcttgatggtcgcacggcgatggcgagcggcgaaagccagtggatcacttcgccccaggcgcggcgtgatgtacaactactgcgcgcgcaaagtcatgccattttaaccagcagcgccacggtgctggcggatgatcctgccttaacggtgcgttggtctgaactggatgaacaaactcaggcgctctatccgcaacaaaatctccgtcagccgatacgtattgtgattgatagccaaaatcgcgtgacgccggtacatcgcattgtgcagcagcccggcgaaacctggttcgcgcgtacgcaggaagattctcgtgagtggccggaaacggtgcgtaccttgctgattccagagcataaaggtcatctggatctggttgtactgatgatgcaactgggtaaacagcaaattaacagcatctgggtggaagcggggccaacgctcgctggcgcattgctgcaggcgggtttagtcgatgagctgattgtctatatcgcacctaaactattaggcagcgacgcccgcggattatgcacgctgccagggcttgagaaattagccgacgccccccaatttaaattcaaagagatacgtcatgtaggcccggatgtttgcctgcatttagtgggtgcatgatctcccggctcgaaagggaagcagcgcacgaaatattatgctaaaatccgcccccctgcggggccatactcgaacccgaaggaagaaaatgaacattattgaagctaacgttgctaccccggacgctcgcgtcgccatcaccatcgcgcgtttcaacaactttatcaatgacagcctgctggaaggtgcaattgacgcactgaaacgtatcggtcaggtaaaagatgaaaacattaccgttgtttgggtgcctggtgcctatgagctgccgctggcggcgggtgcactggctaaaaccggtaaatacgacgcggtgattgcgctgggtacggttattcgtggtggcactgcccactttgaatatgtcgctggtggtgcaagcaacggcctggcgcatgttgcccaggacagcgaaattccggttgcttttggggttctgaccactgaaagcattgaacaagcgatcgaacgtgctggcaccaaagctggcaacaaaggtgcagaagctgcactgaccgcgcttgaaatgattaatgtattgaaagccatcaaggcctgaaattagtaaggggaaatccgtgaaacctgctgctcgtcgccgcgctcgtgagtgtgccgtccaggcgctctactcctggcagttgtcccagaacgacatcgctgatgttgaataccagttcctggctgaacaggatgtaaaagacgttgacgtcctgtacttccgtgagctgctggccggggtggcgactaataccgcatacctcgacggactgatgaagccatacctgtcccgcctgctggaagaactgggacaggtagaaaaagcagtactgcgcattgcgctgtacgaactgtctaaacgtagcgatgtgccatacaaagtggccattaacgaagcgatcgaactggcgaaatcgttcggcgcagaagacagccataagttcgtcaacggcgtactcgataaagcagcacctgtgattcgccctaacaaaaagtgatatccaggccggtagattcacggaagaccgttccatgatcgccggccttttcttttttacctgctgaggcataacgtatggcatgtggcgagttctccctgattgcccgttattttgaccgtgtaagaagttctcgtcttgatgtcgaactgggcatcggcgacgattgcgcacttctcaatatccccgagaaacagaccctggcgatcagcactgatacgctggtggcgggtaaccatttcctccctgatatcgatcctgctgatctggcttataaagcactggcggtgaacctaagcgatctggcagcgatgggggccgatccggcctggctgacgctggcattaaccttaccggacgtagacgaagcgtggcttgagtccttcagcgacagtttgtttgatcttctcaattattacgatatgcaactcattggcggcgataccacgcgtgggccattatcaatgacgttgggtatccacggctttgttccgatgggacgagccttaacgcgctctggggcgaaaccgggtgactggatctatgtgaccggtacaccgggcgatagcgccgccgggctggcgattttgcaaaaccgtttgcaggttgccgatgctaaagatgcggactacttgatcaaacgtcatctccgtccatcgccgcgtattttacaggggcaggcactgcgcgatctggcaaattcagccatcgatctctctgacggtttgatttccgatctcgggcatatcgtgaaagccagcgactgcggcgcacgtattgacctggcattgctgccgttttctgatgcgctttctcgccatgttgaaccggaacaggcgctgcgctgggcgctctctggcggtgaagattacgagttgtgtttcactgtgccggaactgaaccgtggcgcgctggatgtggctctcggacacctgggcgtaccgtttacctgtatcgggcaaatgaccgccgatatcgaagggctttgttttattcgtgacggcgaacctgttacattagactggaaaggatatgaccattttgccacgccataaagatgtcgcgaaaagtcgcctgaagatgagtaatccgtggcatctacttgctgtcggattcggaagtggattaagcccgatcgttcctgggacgatgggctcgctggcagcgattccgttctggtatctgatgacctttttgccctggcagctctactcgctggtggtgatgctggggatctgtatcggcgtctatctttgtcatcaaacggcgaaagacatgggtgtgcacgatcatggcagcattgtctgggacgaatttattggtatgtggatcacgctcatggcgctgccgaccaatgactggcagtgggttgccgccgggtttgtgattttccgtattctggatatgtggaagccgtggccgatccgctggtttgatcgcaatgtgcatggcggcatggggatcatgatcgacgatattgtcgccggggtgatttccgcaggcatcctgtattttatcggtcatcactggccgctgggtattctgtcgtagttgtgcaccgatgcctgatgtgacgcttgtcacgtctcatcaggcctggactcttatttaaatcctacgacaggatgcggtttatacggcgtttccagttcggcaatctgttccggcttcaaagtgatatccaccgcgttcaatagctcatcaagctgttcttcgcgcgaagttccgataatcggtgcggcaatgcccggtttactcaacaaccaggccagcgcaacttgtgctcgtgtcgcccccagttcttcactgacgcctgttaaccgctctgcgatctgcgcgtcattttcatcgctttctttatagagatttttccccacctcatcagacaccagtcgtgcggtagtttctccccacggacgcgtcagacggccccttgccagcgggctccatggaattaccgccacgccctcctgataacacagtggtagcatctcgcgctcttcttcacgataaatcagattgtagtgatcctgcatactgacaaactgcgcccagccgtgctgtttttggagttccagtgcctgagcaaactgcgaagcgtgcattgatgacgcgccgatataacgcgctttcccggcttttaccacgtcgttgagggcttccagcgtctcttcgatcggcgtgttgtaatcccagcgatgaatttgcaggatatcgacataatccatgccgagacgtcgcaggctgtcgtcgatagagcgcaaaatttgcgcacgggataatccttccggtaaatcaccaacgcgatggaacactttggtcgcaacgaccacgtcttcacgacgggcgaaatcccgcagtgcgcgaccgacgatctcttcgctgctgccgtcagaataactgttggcggtatcaaagaaatttatgccgccttccagtgcacgtttaattatgggacggctgctttcttccggcagtgtccatgcgtgattaccgcgatctggctcgccaaaggtcatacagccgaggcaaagtcgggaaacgcgaaggtcggtttttcctaaggggttgtattgcatgctgccactcctgctatactcgtcatacttcaagttgcatgtgctgcggctgcattcgttcaccccagtcacttacttatgtaagctcctggggcttcactcgtttgccgccttcctgcaactcgaattatttagagtctatgaataatttcttaagcatagcaggagtggagtagggattatgccagccaggccttgattttggcttccataccagcggcatcgaggccgagttcggcgcgcatttcttcctgagttccttgcggaataaagaagtccggcaggccaatgttcagcacgggtactggtttacgatgggccatcagcacttcgttcacgccgctgcctgcgccgcccataatggcgttttcttctacggtgaccagcgcttcatggctggcggccatttccagaattaacgcttcatcaagcggtttcacaaaacgcatatcgaccagcgtggcgttcagcgattcggcgactttcgccgcttctggcatcagcgtaccaaagttaaggatcgccagtttctcgccacgacgcttcacaatgcctttgccaattggtagtttttccagcagcgtcagttccacgccgaccgcgttgccacgcgggtagcgcaccgctgacgggccatcgttatagtgatagccggtatagagcatctggcgacattcgttttcatcgctcggggtcataatgaccatttccggtatgcagcgcaggtaagagagatcaaaagcaccctgatgggtttgaccgtcagcaccaacaatgcccgcgcggtcgatggcgaacaggaccggaagcttttgaatcgccacgtcatgcagcacctgatcataggcgcgttgcaggaaagtggagtaaatcgcgacaatgggtttgtacccaccaatcgccagacccgcagcaaaggtcaccgcgtgttgctcggcaattgccacgtcgaagtagcgatccgggaatttacgtgaaaactcgaccatgccggaaccttcacgcatcgccggagtaatcgccatcagcttgttgtctttcgctgccgtttcgcacaaccagtcgccaaagatttttgaatagctcggcaaaccgccgctacttttcggcaaacaaccgctggagggatcaaatttaggcacggcgtggaaagtgatcgggtctttttctgccggttcataaccacgaccttttttggtcatgatatgcaggaactgcgggcctttcaggtcgcgcatgttctttagcgtggtgataagccccagcacatcgtgaccgtccaccgggccgatgtagttaaagcccagctcttcaaacaacgtgccaggcactaccatgcctttaatatgttcttcggtgcgtttgagcagctctttaattggcggcacgccagagaaaacttttttcccgccttcgcgcagtgaagagtaaagcttaccggaaagcagctgtgccagatggttgttgagcgcgccgacattttcggaaatcgacatttcattgtcgttgagaatcaccagcatatcaggacggatatcgcccgcgtgattcatcgcttcaaacgccatgcctgcggtaatcgcgccatcgccaatgacacagacggtgcggcgatttttgccttctttttcggcagcaaccgcaataccaattccggcactgatggaggttgatgaatgcccgacgcttaatacgtcatattcgctttcgccgcgccacgggaacgggtgcagaccgcctttctgacggatggtgccgattttgtcgcggcgtccggtcaaaattttatgcggataagcctgatgccccacatcccaaatcaattggtcaaacggggtgttgtagacatagtgcagcgccacggtcagttcgaccgtgcccagcccggaggcgaagtgcccgctggaacggctcacgctgtcgagtaaatagcggcgcagttcgtcgcagagtttcggtaaactctctttcggcaacagtcgtaactcctgggtggagtcgaccagtgccagggtcgggtatttggcaatatcaaaactcatcaggggcctattaatacttattgtttatttattacgctggatgatgtagtccgctagcgcttccagtgccgaggtatcgagtgactgttcagccagttgtttcagcgactgacgggcatcgtcgatcagatcccgggctttcttccgggcttgctcaagacccagaagtgcagggtaggtacttttaccaagttgctggtcggcaccctggcgttttcccaacgttgcagtatctcccaccacatccaggatgtcatcctgaacctggaaggcaaggccgatgctctctgcatacttgtcgagtaccggcagagcacgacgtcctttatctccggcgcttaatgcaccaaggcgaacggcggcgcgaatcaatgcgccggttttatgacgatgaatacgctcaagcgcgtccagaggtacgtgtttgccttccgcgtctaaatctaatgcctgaccaccgcacattccggcaataccactggcgctcgccagttcagaaatcatcgaaattctgtcgcggtccgacacttccggcatatcggcatcgcttaaaatcgagaacgccagcgtttgtaaagcgtcgccagcgagaatcgcgtttgcttcgccaaacttcacatggcaggttggcaaaccgcgacgcagatcgtcatcatccattgccggtaaatcatcatgaattaatgagtaagcgtggatacactcaacggcggcagcgggtgcgtccagcgtgtttgtgctaacgccgaacatatgaccggtggcataaaccaggaaaggtcgcaggcgcttaccacctaataatgcgccatactgcatggtttcgaccacgggagtgttctgaaagggcagtggggcgataaaacggctcagcgcctggttggcctgcttaacgcaggcttcgagttgctgcggaaagtccattactcattgtccggtgtaaaaggggttagagaggcgtcttcattgtcagacagcagaatttgtacgcgctgttcggcttgttgtaatttggcctgcccctgacgtgccagctgcacgccgcgttcgaactcgttcagcgcctcttccagcggcaggtcgccactttccagacgggttacaatctgttccagctcgctcagcgccttttcaaagctggcgggcgcctcatttttcttcggcataatgaatgtctgactctcaatatttttcgccccgtcatggtaacggactcagggcaaatagcaaataacgcgcaatggtaaggtgatgtgcacagcaaagcgatgttagtggtatacttccgcgcctggatgcagccgcaggtgtgggctgctgtatttttccctatacaagtcgcttaaggcttgccaacgaaccattgccgccatgaagtttatcattaaattgttcccggaaatcaccatcaaaagccaatctgtgcgcttgcgctttataaaaatccttaccgggaacattcgtaacgttttaaagcactatgatgagacgctcgctgtcgtccgccactgggataacatcgaagttcgcgcaaaagatgaaaaccagcgtctggctattcgcgacgctctgacccgtattccgggtatccaccatattctcgaagtcgaagacgtgccgtttaccgacatgcacgatattttcgagaaagcgttggttcagtatcgcgatcagctggaaggcaaaaccttctgcgtacgcgtgaagcgccgtggcaaacatgattttagctcgattgatgtggaacgttacgtcggcggcggtttaaatcagcatattgaatccgcgcgcgtgaagctgaccaatccggatgtgactgtccatctggaagtggaagacgatcgtctcctgctgattaaaggccgctacgaaggtattggcggtttcccgatcggcacccaggaagatgtgctgtcgctcatttccggtggtttcgactccggtgtttccagttatatgttgatgcgtcgcggctgccgcgtgcattactgcttctttaacctcggcggcgcggcgcatgaaattggcgtgcgtcaggtggcgcattatctgtggaaccgctttggcagctcccaccgcgtgcgttttgtcgctattaatttcgaaccggtcgtcggggaaattctcgagaaaatcgacgacggtcagatgggcgttatcctcaaacgtatgatggtgcgtgccgcatctaaagtggctgaacgttacggcgtacaggcgctggtcaccggcgaagcgctcggccaggtgtccagccagacgctgaccaacctgcgcctgattgataacgtctccgacacgctgatcctgcgtccgctgatctcttacgacaaagagcacatcatcaacctggcccgccagattggcaccgaagactttgctcgcacgatgccggaatattgtggtgtgatctccaaaagcccgacggtgaaagcagttaaatcgaagattgaagcggaagaagagaagttcgacttcagcattctcgataaagtggttgaggaagcgaataacgttgatatccgcgaaatcgcccagcagaccgagcaggaagtggtggaagtggaaaccgtcaatggcttcggcccgaacgacgtgatcctcgatatccgttctatcgatgaacaggaagataagccactgaaagtcgaagggattgatgtggtttctctgccgttctataaactgagcaccaaatttggcgatctcgaccagaacaaaacctggctgctgtggtgtgagcgcggggtgatgagccgtctgcaggcgctctatctgcgcgagcagggctttaacaatgtgaaggtatatcgcccgtaatttgtggtttttacgtcgcatctggtcagatgcgacgtttgccgcatccgacactactcgtaataattataaatccctgccgccatcaccagttgtgatgccacttcatgggctttttcacgcccaaccaacaggtcgataattttcagaccaaagtcgatagctgtacccggcccctggctggtcagcaattttacccgtgcatcccagacgacgcgcttgtccagccattgttcggcgggaattttgtctttcagcgtcgggaagccggtcatattaccaatcgggaagatatcgtgcggcaccagcacggtggctggcgcggcgcaaatagccgcgacgatacgcccggaacggtggaactgtttaacggtttcaaccagcagagtgctatcgcgaaaacactccgcgcctttaatgccaccaggcagcacgatcacgtcatattcgccatcagccacttcgaccagcggcgcatccgccagcagcttcacgccgcgcgagcaggtaatcgccaggttaccatcgctggcgacgctggcagtggtgactttgataccgccgcgaaccagcagatcgatagtggtgacggcttcagtctcttcactaccaggggcgaggcaaaccagtgccgatgcgctcatattcactctcctttctttttaccatttcaaacaggcgggtgttttccggtacggcaatcccatgcgcgcgggcgcggcgtaagagaaaaccattgatatagtcgatttcagtgtggcgcagcgcgcggatatcctgcaacatcgacgagatattttccgctgtggcatcaatcacctgcatcacgtaatcacgcaaatcttctgctgaagtatgatgcccttcgcgttcgatcaccgccgcgacttcttcgcatatctgcataatttcttgcggatgatgacgtaattcaccgttcgggcaattccagatggcagtcagtggattaatcacgcagttgactgccagcttgcgccacagctcggcgcgaatattgttatgccaggcaacgtcaggcaacacggtttgcaaaatatccgccagataactgtaatccccgtcctgttgccgtgccgggccaatatgcgtgataccgtttgccacatgaataatgacattgccgtcgcggcgggctgcatgggtggtggtgcccatcagtaatggctgctgaatgttttgcaactcttcgatggtgcccatgccgttgtgaattaacagtattggcgtagttacaggcagtgtggacgcgaggcttttgacggcatcggaaacctgccatgctttcagcgtcaccaggagcagatcgctggtggcgagaaaatcgggatcgttggcggtcagcgattcgttaaatatcgaaccatctgtctcaaccagattcacgctacaataaggttgcggtacgcgcagccagccctgaacttcatgaccctgtttgcaaagtgctgtaagccataattgccctaaggcaccgcatcccaatacggtaattttcattgttcctcctcacccgcaaccactccgggtgttcaataaggctatcccttaattgtgcatgctgttgcgactatgcacaattaagggatacgtcctggtgcaggactgtcggttatttaactttgcgggtattatgcttcgcatcaaaaatgaagggagaggaaaagatgccatctttcgatattgtctctgaagttgatcttcaggaagcacgtaacgcggtcgataacgcgagccgcgaagtggagtcccgttttgacttccgtaacgttgaagcctcatttgagctgaacgacgccagcaaaaccatcaaagtgttgagcgagtccgatttccaggtcaatcagttgctggatattctgcgtgccaagctgctgaagcgcggcattgaaggcagttcgctggatgtaccggagaatatcgttcatagcggtaaaacctggtttgtggaagcgaaactgaaacagggcattgagagcgcgacccagaagaaaatcgtcaagatgatcaaagacagcaaactgaaagtgcaggcgcaaattcagggcgatgaaatccgcgtaacgggcaaatctcgtgatgatttgcaggctgtcatggcgatggtacgtggtggcgatctcggtcagccgttccagttcaaaaacttccgcgattaatcgcgactatgtgcgttttgttcatgtcagatgcggcatgaacgcctgattcggcctacaaaggtttgtaattcagaaactttgtaggcctgataagcgtagcgcagcaggcaattcgccgcgttttttatgcctgacgaattgcctgttctatctcaaagcgattcgtcactttgctgtcgattttcacataagctgaatgttcttcttctgcaatcaacacttctttgatgccttcagtttctagcaaacgcacttttaacgcctcgtttgcggcaatgttcgccgggatttcaatgcgcaaactgctgacatacggcggttctttcatggtactggcgactgtcagccacactgcggccagcattgcgccagcgagaaataccccctgaccgtcaaacatgccgttaatccagccgcccagcgaaccgccaatcgccacgccaagaaactggctggtggagtaaacacccatcgccgtacctttgtaacctgctggcgactctttactgataagtgagggcaggagggcttccatcaaattaaacgccacaaagaaaagctgcacgccgaccaccagttgccagaactgcgtttgcgcgttccacaacacaatttccgcaaccacgatcaacccgacgcagaagacaaagacttgcttcattttgcgcttaacttcagcgtagataatgaaaggcacgaccgagccaaaggcgattagcattgtcgccagatagaccttccagtgttcagccgccgggaaccctgcatcagccagttgtccgggcagggcaacaaacgtcgacatcagcaaaatatgcagacacataatgccaaagttgagtttcagcagccgcggttccgccagcactttactgaaactgcctttcaccattccggactcacgattaagtacgtgagtgctactgttgggcacaacccaaatggtcaacgcaatgccggtcgttgccagaatagcgatcatccagaacagcgcgtgcagcccaagtttgtgagtgatgatcgggccaagcaccatcgcaatggcaaaggtaatgccaaagctcacgccgataaacgccatcgctttggtgcggttttgttcgcgcgtgagatcggaaagcagcgccataacggcggcggcaattgctccagagccttgtagcgcccggcccagaataattccccagatggagtcggaaagcgcagcgataacgctaccggcggcaaacaccgccagcccaccgacaattaatggtttgcgaccaatgcggtcggaaagcaggccaaacggaatctgaaaaacggcctgagtcagaccataaataccaatggcaataccgattaatgcttcgctggcaccttgcagagccatgccgtacgtggtcagaaccggcagaaccataaacatgcccagcatgcgcaacgagaatacggtccctaaaccccaggtcgcgcgcctctcacctggcgtcattttataatcgttcattaccacctctgttttaaattcgcgactagtgtaaagcggcaaacgaatggggtaaacatgcggattttttagtaaatatttcgagagggatatgtttctaatgctaagaaaaaaggtgccgtagcacctttttaatagagaggttttgttaccacacagcagccagcagcgtatgcgagtccggtaccataaaatcaacggacatcatcaccgagagggcagtgatggcgatgatagagaagccgaacagcttgcgcgcccagattctgtcatcagcaactttataaccgcgcagagccatacctaaccaccagacgctaaccgccgcggcgaccaccagatatttatacccagcgtaaccgccaagagagagcatcagcgtggcaacggcaaaggcgatgatatacagcgtgatgtgattcttcgccaccgaaatgccttttaccactggcaataccggaatgtttgccgcctggtaatccttaaagcggaaaatggcgatggcataggagtgaggcatctgccacaggctgaagatagccagcaggatcgctgcgccgctatcgaactcaccggttaccgcacagtagccgatcaccggcggcgcagcgccggagagcgaaccaatcaacgtgccgtagacagagtggcgtttcatgtacaggctataaacgccgacataaaccacaaagcccatcacccccagccagcaggccagcggattcgcgccaaaccacagcagcataaagccagcaatacccagcaacgtggcgtacaccagcgagacagcaggagagatcaggcctttcaccagcacccgattcttcgtcctttccatctttctgtcgatatccctgtcgatgtagttgttaaacacacaacccgacgccacaaccagtgacaccccaaccagcgtgtagataaacaggggataatcaatgctgccctttgaggccagcaggaatcccccaatcaccgagatcaggttgccaaagatgatgcctggtttcgttacttgcaggtattgcttaaacatcataaccgccgctcttagtgcatcatcatgttgtagttgaggttccacataatccagatggagcctacaaccaggatagcgatgattagcacggtgaagacaaacgccgtcatgttccagccttcatctgatttggtattcatgtgcaggaagcacaccagatgcaccagaacctgtaccactgccattgccaggattgttcccagaattacggccggagaggcagctcctgtcatcaccatccagaacggaatcaccgtcagaatgatcgacaggataaagcctgtcatgtaggtttttacgctgccatgggacgcgccgctgtgatcggtagaatgactcattacatcgcccccatcagataaacaacagtgaacacacagatccaaaccacatccaggaagtgccagaacaggctcaggcacatgatgcgggtacggttagtgctggtcaggccgcgacgggcgatttgcaccatcagcaccgccatccagataagaccagaagtgacgtgcagaccgtgcgtgccgaccagcgcaaagaacgctgacaggaagccgctgcgatccggacccatgccgttaacaatcaggtgatggaattcatagatttccatcccgataaatccggcaccaaacaaccaggtcaacgccagccaggagataacctggcttttgttgtttttgtacatggcgatagccgccatgccgtaggtgatggagctgaacaacagcaagaaagtttcaaccagaacgaacggcagttcgaaaatgtccttacctgtcgggccgcctgcggtgccgttcaccagaacggcataggtagcaaacaagatagagaacagaatgcagtcgctcatcaggtagatccaaaatccgaagattttggttccgcctgcatcgtggtgcccgtgttcgtgcgcgtgggcagtcgcgtgcgtcaaagtatcagttgccatttttcagccctgccttagtaatctcatcgaaatgctggttttccagtttttcgatttctgccaccggcacgtagtaatccacgtcctcgtcgaagcttttcacgatccaggtgatgatcatgcctgcgaagccaacaatcgccagccaccagatatgccagatcatggcgaaaccgaagatggtggagaaagctgcaatgacgatacctgcaccgctgtttttcggcatatgaatttcttcatagtggtcaggctttttatacgcttcgcctttctctttcatttcccagaatgcatcacgttcgtgaacgtgcggcactacggcaaagttatagaacggaggcggggaagaggttgcccactccagcgtacggccaccccacgggtcgccagtcaggtcacggttctggtcgcggtcgcgaatagaaacgtacatctgaataacgaggcagagaatacccagcgcaatcagtactgcaccgctggctgcaatcatcagcatggtgtggaactgcgggtcaatctgctggctcaaacgacgggtcatgcccatgaagcccagcgcatacagtggcataaaggcaacgaagaagccgatgatccagaaccagaacgcgcgtttaccccaggtttcgttcagtttgaaaccgaacgctttaggccaccagtaggtcatccctgcgaagcagccgaagaccacgccgccgatgatcacgttatggaagtgcgcaatcaggaacaggctgttatgcagaacgaagtccgcgcccggtacggccagcagcacgccagtcatcccgcccaccgagaaggtgacgataaaaccgatggtccacagcatcgcagaatggaacacgatgcggccctgatacatggtgaacagccagttgaagatcttcaccccggtcgggatggcgataatcattgtggtgataccaaagaaggcgtttacgttcgcgcccgcacccatcgtaaagaagtggtgcagccaaacgatgaacgacagcacggtgatacagacggttgcccataccagcgaggtataaccaaacagacgtttacgcgagaaggttgccgcaatttcggagaacacaccgaaaacaggcaggatcaggatgtaaacttccgggtggccccaggcccaaatcaggttgatgtacatcatcatgttgccacccatatcgttggtaaagaaatgggtgcccagatagcgatccagggtcaacaacgcgacggtaaccgtcagaattgggaaggaagcaataatcagtacgttcgcgcacagtgatgcccaggtaaatactggcatcttgaacatggtcatgcccggtgcgcgcatcttcagaatggtaacgaagaagttgataccggtaagcgtcgtacctataccggatagctggagactccatatccagtaatcgacaccgactcccggactgtactctattcccgatagcggtggataggccagccagccggtctgcgcaaattcgcccacgccgagagaaacgttaaccagaatcacaccaacaacggtaaaccagaagcttaagttgttgaggaacgggaacgcaacgtcacgcgcgccgatctgcagcggaaccaccaggttcatcagaccgataacgaaaggcatcgccacgaagaagatcataatcacgccgtgcgcggtaaagatctgatcgtagtggtgaggtggcaggaagcccgcttcgcccgccgaggcaagagcctgctggctacgcatcataatggcgtcagcaaaaccacgcagcaacatcacaatcgccacgatgatatacatgataccgaggcgtttatggtcgacggaggtcagccactctttccacaggtaggtccacttaccgaagtaagtgatcaggccaacgagcgccagacctcccaaaataatgccagcgatcgtaaccatgacgataggttcatggaacgggactgcatcaagtgataattttccgaacatctttattcttcctcaacccctttaatgggcggattccgcgtggctcatgtccatgccttccataccttcgtgtgcgctgtgctcaccttctggctgggtcatgtccatgctcttaccgtgagccataaacttgttaattacatcggcaaacaagtctggtttcacgttggagaaatattccacctggttgtattcgctaggcgcggccagtttttcgaacgcagccatgtcagacatggtgttcggcgactgcttcgcttttgcgacccactggtcgaatgcggcgcgatccggtgttgcaatagctttgaacttcatgcctgagaagcccgggccgctgtagctggcggagataccgtcataagtgccgggttcgttggcgatcagatgcaggcgagtctgcataccggccatggcataaatctggctacccagacgcggaatgaagaaggagttcatcacggagttggaggtcactttgaagtacaccggagtgttcgccgggaaagcgatttcattcacggtagcaatgccctgttccgggtagatgaagaaccatttccagtccatggaaaccacttcgatggtaatgggcttctcgtcgtgtgccagcggcttgctaggctcaagagcgtgagtggttttccaggtcagtactgcaaggaagatgatgattaagataggtaccgtccagaccacagcttccactttattggagtgtgaccagttcgggctgtacttagcatctttattgctcgcacggtacttccaggcgaaaccaacagccatcaagattgcgggaataacgacaatcaacatcaggccaaatgccgtcagtatcagtgaacgttgctccagaccaatctgtcctttgggatctaacagcgcagaattacagccactgagcaatacagtgcctgcaaataatgacaaccatcccaaacttttattgtatttcctgagtctcatttaacgacctcaattccacgggatctggtggcgtttaaagtgtgtgggcattttacgggaaggttacattactgtaaacatgattaaattcctgttacttggatttggctgccaggtcacatatgttgcaaaacatatcaggttgattttaagaagctgttgcaaaagggcgttataacaaaaggggagtgctgaaggagtctgggcgggcaattggtataaccaatgtgaaataaaacaattatttaacaaataattatcattggagtgacaactgggtgatgagaaaataaagactcattagctgaatcgtgtaagaaaaatagaatttataaatggcgccaataatttccaaacgctaagccgcacaaaagaacaaatattaataagcgatactgatgtttatttagccgtaataattacggcgagtgattactacagctaaataatatttacagattacgtcagatgcgtttttcgtagcgccagataatccagcaaaccaccaagcacgacgccagaaagggcgactaaaaccccgacttccagcagagcaggcaggaaagagaagtgcgtcaaatccagcgcgtccatcgtcaatagcagtaaccacacggccaacaggctgacgcccgccgccagtgtccacatggcaaaggcataacctgccggatatgcggtacgggagataaagttgtcatttactcgtgtatattcaagcgtctggcggcaaaccagcagcaaaataagccctggtacggcagcggcgacggagaatagatagaatgtcgaccagccgtgtgcttcaacaaaccaacccgccacggggccgacataaactcgccctacagcagaaagcgctgagagcagggcaaattgagtagcggaaaatgacttattacatagcgtcattaacagcgcgacaaaggctgatgtgcccatcccgccacagaggttttcgaaaaagacggctgcgcccatgctgtagagatgcttatcagtaatcgacagcagccagtaaccggcgttagacgcaccttgtaaaatgccgaaaatcagcagtgcccggaacagtgacaggcgctgcatcaaaatcccaccgtacaatgcgccaacaatggtcgctagtaagccaagcgttttgttaaccacgcctacttcacccgcatcaaacccgacgccgcgaatcaaaaacgtggttgtcaggctcatggcgaatgcgtcgcccagcttatacagcacgataagaagcaaaataagccaggcattattgcgaccaaagaaatctcgcagaggtgcaacaaccgcttgttccagcgtttttggcacaggaatggtgtcggtcggttctggtgcaagcaacgtcgcgataatacaggggatcaacagcgccgccatcaaccagtacatgccctgccagcccagccatttatctgccagccacagggctaggccgccggaaaccagcatccctaaacggtaacccagaacgctgattgccgcgcccgcaccacgttcttctgccgggagcacatcggttttccacgcatcgaagacaatatcctgggaggcagagcaaaaagcgatcaccaccgccagcgccgccatccagcggagttgggtgcctggttcgagaaaacccatcgccgcaatggcgactaataacaggatttgcgtggcgagcagccaaccgcgtcgccgcccaaaaaatggaggcgtgtagcggtccatcagcggtgaccagaggaatttaaaaacgtaagcctggcctaccagagagaagaaaccaatggttttgagatcaatattctcgaccgtcatccaggcctgtaaggtaccggatgtcagggcgagcggtagcccggaagcaaaacccaggatcagcaatatggctgaacgcggctgttgaaaaatacgtaaatattgactggacatgggcgtctacaggcccggcttgcaccgggccagagggcagaaattaacgcgcgttctgcttgatgaattcgtggatgctggtgtcctgagacatatcagcgatggtatcggtcagcacactgttaaccgcatcggcgatatttttgttggaggcctggaacgcaccttcaacgttgtagctggcacgatagtttttggtcattttgttgccattctgcgcggtagcgatgatggcgatatccgctttggtcgcgatgttgtagcgcacgttgccctgggacacgtcagcatacagttggctaacgatgatttgcagattaaccgggccattcggaccaaccatgtaaccacgcgcggtcatctgtttttccagcacttcttgcagcaggaaacgcagatcgcgggaggcggtcagggtaacgatttgattatcgcgggtgacttttgccagcgcctgatcggtacgctgatcggcaccattaatgcttacggtgacgcccatcaggcttggatcctgctgtggcagtgtaatcgtcggggaaacttcaatagttgttggcggttttgcgcatcctgcaagcataaacagagcaactaacgggaagaggatttttttgaacatgttcgggctctcagagactcttaagcgtgtttggtaaaaattcccgccatcataacattgccaacggcgaggggaagtgggtaaggcatgtaaattcatcatgttgacgaaataatcgcccctggtaaaagaaacactgatgcgaggcctgtgtttcaatctttaaatcagtaaacttcatacgcttgacggaaaaaccaggacgaaacctaaatatttgttgttaagctgcaatggaaacggtaaaagcggctagtatttaaagggatggatgacatctcagcgttgtcggaggagatatttcatgatgatacgtgagcggatagaagaaaaattaagggcggcgttccaacccgtattcctcgaagtagtggatgaaagctatcgtcacaatgtcccagccggctctgaaagccattttaaagttgtgctggtcagcgatcgttttacgggtgaacgttttctgaatcgtcatcgaatgatttacagtactttagcggaggaactctctactaccgttcatgcgctggctctgcatacttacactattaaggagtgggaagggttgcaggacaccgtctttgcctctcctccctgtcgtggagcaggaagcatcgcgtaaaaacgcatttgcaactgtcggcgcttttccagtatgttgctaaagattttatgaaaaacggcctgcgggccgttttgttttgtctggattttgcgctttttgcccagcattcagacgaaaattgcccgggaattgtgaaaaaatacgcgacagcgcgcaataaccgttctcgactcataaaagtgatgccgctataatgccgcgtcctatttgaatgctttcgggatgattctggtaacagggaatgtgattgattataagaacatcccggttccgcgaagccaacaacctgtgcttgcggggtaagagttgaccgagcactgtgattttttgaggtaacaagatgcaagtttcagttgaaaccactcaaggccttggccgccgtgtaacgattactatcgctgctgacagcatcgagaccgctgttaaaagcgagctggtcaacgttgcgaaaaaagtacgtattgacggcttccgcaaaggcaaagtgccaatgaatatcgttgctcagcgttatggcgcgtctgtacgccaggacgttctgggtgacctgatgagccgtaacttcattgacgccatcattaaagaaaaaatcaatccggctggcgcaccgacttatgttccgggcgaatacaagctgggtgaagacttcacttactctgtagagtttgaagtttatccggaagttgaactgcagggtctggaagcgatcgaagttgaaaaaccgatcgttgaagtgaccgacgctgacgttgacggcatgctggatactctgcgtaaacagcaggcgacctggaaagaaaaagacggcgctgttgaagcagaagaccgcgtaaccatcgacttcaccggttctgtagacggcgaagagttcgaaggcggtaaagcgtctgatttcgtactggcgatgggccagggtcgtatgatcccgggctttgaagacggtatcaaaggccacaaagctggcgaagagttcaccatcgacgtgaccttcccggaagaataccacgcagaaaacctgaaaggtaaagcagcgaaattcgctatcaacctgaagaaagttgaagagcgtgaactgccggaactgactgcagaattcatcaaacgtttcggcgttgaagatggttccgtagaaggtctgcgcgctgaagtgcgtaaaaacatggagcgcgagctgaagagcgccatccgtaaccgcgttaagtctcaggcgatcgaaggtctggtaaaagctaacgacatcgacgtaccggctgcgctgatcgacagcgaaatcgacgttctgcgtcgccaggctgcacagcgtttcggtggcaacgaaaaacaagctctggaactgccgcgcgaactgttcgaagaacaggctaaacgccgcgtagttgttggcctgctgctgggcgaagttatccgcaccaacgagctgaaagctgacgaagagcgcgtgaaaggcctgatcgaagagatggcttctgcgtacgaagatccgaaagaagttatcgagttctacagcaaaaacaaagaactgatggacaacatgcgcaatgttgctctggaagaacaggctgttgaagctgtactggcgaaagcgaaagtgactgaaaaagaaaccactttcaacgagctgatgaaccagcaggcgtaatttacgcagcataacgcgctaaattcgcacaaaggcccgtcaccgccaggtggtgggcttttttttgtcatgaattttgcatggaaccgtgcgaaaagcctctttcggtgttagcgtaacaacaaaagattgttatgcttgaaatatggtgatgccgtacccataacacagggactagctgataatccgtccataaggttacaatcggtacagcaggttttttcaattttatccaggagacggaaatgtcatacagcggcgaacgagataactttgcaccccatatggcgctggtgccgatggtcattgaacagacctcacgcggtgagcgctcttttgatatctattctcgtctacttaaggaacgcgtcatttttctgactggccaggttgaagaccacatggctaacctgattgtggcgcagatgctgttcctggaagcggaaaacccagaaaaagatatctatctgtacattaactccccaggcggggtgatcactgccgggatgtctatctatgacaccatgcagtttatcaagcctgatgtcagcaccatctgtatgggccaggcggcctcgatgggcgctttcttgctgaccgcaggggcaaaaggtaaacgtttttgcctgccgaattcgcgcgtgatgattcaccaaccgttgggcggctaccagggccaggcgaccgatatcgaaattcatgcccgtgaaattctgaaagttaaagggcgcatgaatgaacttatggcgcttcatacgggtcaatcattagaacagattgaacgtgataccgagcgcgatcgcttcctttccgcccctgaagcggtggaatacggtctggtcgattcgattctgacccatcgtaattgatgccagaggcgcaactgtgccgctatacttatccagggcggcacaacgctgtaagcggcttgcgcctgagaatggcatttgcgtcgtcgtgtgcggcacaaagaacaaagaagaggttttgacccatgacagataaacgcaaagatggctcaggcaaattgctgtattgctctttttgcggcaaaagccagcatgaagtgcgcaagctgattgccggtccatccgtgtatatctgcgacgaatgtgttgatttatgtaacgacatcattcgcgaagagattaaagaagttgcaccgcatcgtgaacgcagtgcgctaccgacgccgcatgaaattcgcaaccacctggacgattacgttatcggccaggaacaggcgaaaaaagtgctggcggtcgcggtatacaaccattacaaacgtctgcgcaacggcgataccagcaatggcgtcgagttgggcaaaagtaacattctgctgatcggtccgaccggttccggtaaaacgctgctggctgaaacgctggcgcgcctgctggatgttccgttcaccatggccgacgcgactacactgaccgaagccggttatgtgggtgaagacgttgaaaacatcattcagaagctgttgcagaaatgcgactacgatgtccagaaagcacagcgtggtattgtctacatcgatgaaatcgacaagatttctcgtaagtcagacaacccgtccattacccgagacgtttccggtgaaggcgtacagcaggcactgttgaaactgatcgaaggtacggtagctgctgttccaccgcaaggtgggcgtaaacatccgcagcaggaattcttgcaggttgatacctctaagatcctgtttatttgtggcggtgcgtttgccggtctggataaagtgatttcccaccgtgtagaaaccggctccggcattggttttggcgcgacggtaaaagcgaagtccgacaaagcaagcgaaggcgagctgctggcgcaggttgaaccggaagatctgatcaagtttggtcttatccctgagtttattggtcgtctgccggttgtcgcaacgttgaatgaactgagcgaagaagctctgattcagatcctcaaagagccgaaaaacgccctgaccaagcagtatcaggcgctgtttaatctggaaggcgtggatctggaattccgtgacgaggcgctggatgctatcgctaagaaagcgatggcgcgtaaaaccggtgcccgtggcctgcgttccatcgtagaagccgcactgctcgataccatgtacgatctgccgtccatggaagacgtcgaaaaagtggttatcgacgagtcggtaattgatggtcaaagcaaaccgttgctgatttatggcaagccggaagcgcaacaggcatctggtgaataattaaccattcccatacaattagttaaccaaaaaggggggattttatctcccctttaatttttcctctattctcggcgttgaatgtgggggaaacatccccatatactgacgtacatgttaatagatggcgtgaagcacagtcgtgtcatctgattacctggcggaaattaaactaagagagagctctatgaatcctgagcgttctgaacgcattgaaatccccgtattgccgctgcgcgatgtggtggtttatccgcacatggtcatccccttatttgtcgggcgggaaaaatctatccgttgtctggaagcggcgatggaccatgataaaaaaattatgctggtcgcgcagaaagaagcttcaacggatgagccgggtgtaaacgatcttttcaccgtcgggaccgtggcctctatattgcagatgctgaaactgcctgacggcaccgtcaaagtgctggtcgaggggttacagcgcgcgcgtatttctgcgctctctgacaatggcgaacacttttctgcgaaggcggagtatctggagtcgccgaccattgatgagcgggaacaggaagtgctggtgcgtactgcaatcagccagttcgaaggctacatcaagctgaacaaaaaaatcccaccagaagtgctgacgtcgctgaatagcatcgacgatccggcgcgtctggcggataccattgctgcacatatgccgctgaaactggctgacaaacagtctgttctggagatgtccgacgttaacgaacgtctggaatatctgatggcaatgatggaatcggaaatcgatctgctgcaggttgagaaacgcattcgcaaccgcgttaaaaagcagatggagaaatcccagcgtgagtactatctgaacgagcaaatgaaagctattcagaaagaactcggtgaaatggacgacgcgccggacgaaaacgaagccctgaagcgcaaaatcgacgcggcgaagatgccgaaagaggcaaaagagaaagcggaagcagagttgcagaagctgaaaatgatgtctccgatgtcggcagaagcgaccgtagtgcgtggttatatcgactggatggtacaggtgccgtggaatgcgcgtagcaaggtcaaaaaagacctgcgtcaggcgcaggaaatccttgataccgaccattatggtctggagcgcgtgaaagatcgaatccttgagtatcttgcggttcaaagccgtgtcaacaaaatcaagggaccgatcctctgcctggtagggccgccgggggtaggtaaaacctctcttggtcagtccattgccaaagccaccgggcgtaaatatgtccgtatggcgctgggcggcgtgcgtgatgaagcggaaatccgtggtcaccgccgtacttacatcggttctatgccgggtaaactgatccagaaaatggcgaaagtgggcgtgaaaaacccgctgttcctgctcgatgagatcgacaaaatgtcttctgacatgcgtggcgatccggcctctgcactgcttgaagtgctggatccagagcagaacgtagcgttcagcgaccactacctggaagtggattacgatctcagcgacgtgatgtttgtcgcgacgtcgaactccatgaacattccggcaccgctgctggatcgtatggaagtgattcgcctctccggttataccgaagatgaaaaactgaacatcgccaaacgtcacctgctgccgaagcagattgaacgtaatgcactgaaaaaaggtgagctgaccgtcgacgatagcgccattatcggcattattcgttactacacccgtgaggcgggcgtgcgtggtctggagcgtgaaatctccaaactgtgtcgcaaagcggttaagcagttactgctcgataagtcattaaaacatatcgaaattaacggcgataacctgcatgactatctcggtgttcagcgtttcgactatggtcgcgcggataacgaaaaccgtgtcggtcaggtaaccggtctggcgtggacggaagtgggcggtgacttgctgaccattgaaaccgcatgtgttccgggtaaaggcaaactgacctataccggttcgctcggcgaagtgatgcaggagtccattcaggcggcgttaacggtggttcgtgcgcgtgcggaaaaactggggatcaaccctgatttttacgaaaaacgtgacatccacgtccacgtaccggaaggtgcgacgccgaaagatggtccgagtgccggtattgctatgtgcaccgcgctggtttcttgcctgaccggtaacccggttcgtgccgatgtggcaatgaccggtgagatcactctgcgtggtcaggtactgccgatcggtggtttgaaagaaaaactcctggcagcgcatcgcggcgggattaaaacagtgctaattccgttcgaaaataaacgcgatctggaagagattcctgacaacgtaattgccgatctggacattcatcctgtgaagcgcattgaggaagttctgactctggcgctgcaaaatgaaccgtctggtatgcaggttgtgactgcaaaatagtgacctcgcgcaaaatgcactaataaaaacagggctggcaagctaattcgggcttgccagcctttttttgtctcgctaagttagatggcggatcgggcttgcccttattaaggggtgttgtaaggggatggctggcctgatataactgctgcgcgttcgtaccttgaaggattcaagtgcgatataaattataaagaggaagagaagagtgaataaatctcaattgatcgacaagattgctgcaggggctgatatctctaaagctgcggctggccgtgcgttagatgctattattgcttccgtaactgaatctctgaaagaaggggatgatgtagcactggtaggttttggtacttttgccgttaaagagcgtgctgcccgtactggccgcaacccgcagaccggtaaagagatcaccatcgctgctgctaaagtaccgagcttccgtgcaggtaaagcactgaaagacgcggtaaactaagcgttgtccccagtggggatgtgacgaagttcaagggcgcatctactgatgtgccttttttatttgtattcggtgactttctgcgtcttgtgggctgacaattgcccccgtttcttgtcacaataggcctttgcgcgcatcgatacgttgcgtgaggtacacagtcatctacagcggagtgttgttacaccatgatggacagcttacgcacggctgcaaacagtctcgtgctcaagattattttcggtatcattatcgtgtcgttcatattgaccggcgtgagtggttacctgattggcggaggcaataactacgccgcaaaagtgaatgaccaggaaatcagccgtgggcaattcgagaacgccttcaacagcgagcgtaatcgcatgcagcaacagctgggcgatcaatactccgagctggcagcgaacgaaggctatatgaaaaccctgcgtcaacaggtgctgaatcgtctgatcgacgaggcgctgctggatcagtacgcacgtgagctgaaactgggtatcagcgatgagcaggttaaacaggcgattttcgcgaccccagccttccaggttgacggcaaatttgataacagccgctataacggtatcctcaaccagatggggatgaccgccgatcagtacgcccaggcgctgcgtaaccagctcactacccaacagctgattaacggcgttgccggtaccgattttatgctgaaaggtgaaaccgacgagctggcggcactggtcgcgcaacaacgcgtggtgcgtgaggcgactatcgatgttaacgcgctggcggcgaagcagcctgtgaccgaacaggagattgccagctactacgaacaaaacaaaaacaatttcatgacgccggaacaattccgcgtgagttacatcaagctggatgccgcaacgatgcagcaaccggttagcgatgcggatatccagagctactacgaccagcatcaggatcaattcacccagccgcagcgtacccgctacagcatcatccagaccaaaactgaagatgaagcgaaagcggtacttgatgagctgaataaaggcggtgattttgctgcattagccaaagaaaaatctgccgatattatctctgctcgtaacggcggcgatatgggttggttagaagatgccactatcccggacgaactgaaaaatgctggtctgaaagaaaaaggccaactgtctggtgtcatcaaatcttcggtcggtttcctgattgtacgtctggacgacattcagccagcgaaagtgaaatcgttagacgaagtacgtgacgacattgcggcgaaagtgaaacacgaaaaagccctcgatgcgtactacgcgctgcagcagaaagtgagcgatgcggcaagcaacgacaccgagtctctggccggtgcagagcaagctgccggcgttaaagccactcagacgggttggttcagcaaagataacctgccggaagagttgaacttcaagccggttgccgacgctatctttaacggcggtctggtaggtgaaaacggcgcgccgggcatcaactctgacatcatcaccgtagacggcgaccgcgcattcgtgctgcgcatcagcgagcacaaaccggaagcggtgaaaccgttggcagatgttcaggaacaagttaaggcattggttcagcacaacaaagctgaacaacaggcgaaagtggatgctgagaaactgctggttgatttgaaagccggcaaaggtgcggaagctatgcaggctgccggtctgaaatttggcgagccgaaaaccttaagccgttccggtcgtgacccgattagccaggcggcgtttgcactgccactgccagcgaaagacaaaccgagctacggtatggcgaccgatatgcaaggtaatgtggttctgctggcgctggatgaagtgaaacaaggttcaatgccggaagatcagaaaaaagcgatggtgcagggtatcacccagaacaacgcacaaatcgtctttgaagctctgatgagtaacctgcgtaaagaggcgaaaatcaaaattggcgatgcgctggaacagcaataatcctgaagccgcctcgcaaaaaaatgcgttgcagctgtaacaagaaaaggtcgctttcgcggccttttccatttctgaacattgccatttgtttactgttttcactgccgttaaggtgattccactgttaacaaacaaggagaaaacagtatgaaacacggaattaaagcactgctcattaccctgtccctggcctgtgccggaatgtctcatagcgcgctggcggcagcttctgtggcgaaaccgacggcggtagaaaccaaagcggaagctcctgcagcacaaagtaaagcagcagtaccggcgaaagccagtgacgaagaaggcacccgggtcagcattaataatgccagcgcggaagagctagcccgcgcgatgaatggcgttggcctgaagaaagcgcaggcgattgtcagttatcgcgaagagtacggtccgtttaaaactgtggaggatctaaagcaggtgccggggatgggcaattcgctggtggaacgtaatctggcggtattaaccctgtaattaatttgcatagtggcaattttttgccagactgaagaggtcataccagttatgacctctgtacttataacaacaacgtaaggttattgcgctatgcaaacacaaatcaaagttcgtggatatcatctcgacgtttaccagcacgtcaacaacgcccgctaccttgaatttctcgaagaagcccgctgggatgggttggaaaatagcgacagttttcagtggatgacggcccataacatcgccttcgtcgtggtcaatatcaatattaactatcgtcgcccagcggtattaagtgacctgttaactattaccagtcagttgcagcaattaaacggtaaaagcggcatcttaagccaggtcattacactggagccggaagggcaggtggtagcggatgcgcttattacgtttgtttgtattgatcttaaaacgcagaaagcattagctctggaaggggaattgcgcgaaaagctggagcagatggttaagtaaacgttttgtggtgccggatgctcaagccgcatccggcgacacccggaataattacctcaacccggttttctgcttcatcgctgccatcaccgtcggtttatcggccagataatgattcaaaccgttggcgcgtaaattacatgccgcacaatgaccgcaaccgtcgcctttaaagccgttatagcaggtcaacgtttcgttacggactaaatccagtttgccgtaataatctgccagcgcccaggtttccgctttatcaatccacatcagcggcgtttcaaaacgaatatctttcgccatgcccaaactgacggcatggtttagtgctttcacaaactcatcgcggcaatccgggtagccggagaaatccgtttcgcagacgccagtaattacggcttctgcttttacctgatacgcatatattgccgccagcgtcaggaacaaaatattacgccctgggacaaacgtattcgggataccatcggcttcaggttcataatcaggcaccggaatgctgtcacgcgtcaggctactgaccgccagctcgttgagcagggtgacatccagcaccttatgcgcgcgtgcccccagtttcagcgccagttcgcgtgccacgtcgatttctgcgcgatgccgctgaccgtaatcgaacgtcacgcaatggacttcatcatattgttgtaatgcctgcaccagacaggtggtggaatcctgacctccactgaacacaacgacagcacgtttcatagataatcctgcttgaacaataaaagcgttatggtaacgcctgcgattaacccggaccagctattcattgcgatggcgcgggaagccaggcttcggtaaattcaaaccagccgcgcggtgtcagtcgcacaccgttcacgccgggaggggcactaatgcgatagtgatagttgaacagcggcgtcagcgtcgcatctgtcattaactggctaaaaaccgctttcagggcattaaatcggttttcttcatcaggcattatttgcacggcatccagtgtcgattgtagatgtgcgtatgctggagcgtcgaaaacatgtggccacagcggatcgcagcgcagccattgctccagagtatattccggtgcttcgccaattaatctgtcgcccatcatgaggtctgcgtgtgcctgtagggtcgtgtcgtcccagttttttgcgttatgaaaaataattgtgagttcacagccttccgctgccagtgtcgcctgtaggcgttctgccatggtatgaagttctatcggtaggtgataaaccagcgtcaaggttttcggtagtttgacttcatccggtacctgccaatgcggaatagtccagcctggcagtaatgcatgactggcggtgatcaggttttctccgacttctaacgtttgtaataaaccggattgatgaataatggagatcacttttcgcgcctgccagagggagagtcggggacttttgcgcaacgtcaaatagcaaaaacctaaactgatgccgctactgacctggctgacccgttgcagctcctccggtttgccgatggtgatttgcacgggatgccgacaactggttcccaaatctttttcgaaaagcggcggagttatccagtactcaaccgctttaagcagcggatgacgtaaatggtaataatcatggctttccaggcgcaccagctctgctgtgaattgtgttaagcgaaaaggacccgtgccgatcagtgggaattgcggatgcgccagatggctgcaatagctcgccagccggtgcgcaagccagtaatcagggcgatgtaaaaagaaggtcagacactgcggatgggtgacttcaatacgcttcacgctaataaataattgatccagtgctggcagttgtaacagcatcaataatcgctggtgtaagtgtgaggcttttactgcatcgccgttatgccagtgtagggttgaacgaagataaaagtcccagcgtaacccgtcagtagaggtttcccagtgatgcgctaaatcgccaatcgggcgctgagtattattatcgaagcgggtcaggccggaaaatatctgcccggcgagatgctgctcggcacggccgggcaaaaagcctggttgtagcggttcgagcgggcgatagtagggaatacgcaacgtgggtgtatcgttttgccattgtccgcccataaacggctgtaacagagtgcgcagctcacctggggccagttgcgccagctccagcacatcttgctgctttccggtttccagtgcctgttccatcatcgcattgcgtagcgattccggcgtgaccagaaagcgtaattgtccgcgctttccgcgtcctgactgcgcctgccactccagccatcccgcctcctgtgcctgacgcaacagcgtacgaacatggcgttcgctgcaaaaacagcgttcggccagttcgctgacggtgacggtttgcggctttccggcggaaggttgccacagacgttgatactggttaagacggttgagcaatcgcatataaacccggaacaatattatttaactattcactattacttccgtatatatcaggtgatactcaatcaccattaaccgtgtcacagagtggagaaagaaatggctcgtctggcagcatttgatatggatggcactttattgatgcctgaccatcatttaggtgagaaaaccctctctactttggcgcgactgcgtgaacgcgacattaccctcacttttgccacggggcgtcatgcgctggagatgcagcatattctcggggcgctatcgctggatgcgtatttgattaccggcaacggaacgcgcgtgcattctctggaaggtgaacttttacatcgtgatgatttacctgcggatgtcgcggagctggtgctgtatcagcaatgggatacccgagccagcatgcatatcttcaatgacgacggttggtttaccgggaaagagatccctgcgttgttgcaggcatttgtctatagcggttttcgttatcagataatcgatgtcaaaaaaatgccactcggcagcgtcaccaagatctgcttctgtggcgatcacgacgatcttacacgcttgcagatccagctatacgaagcattaggcgagcgtgcacatttgtgtttttccgccacggattgcctcgaagtgctgccggtgggctgcaataaaggcgctgcattgacggtgctgacccaacatttaggtttatcgttgcgcgattgcatggcctttggtgatgcgatgaacgatcgcgaaatgttagtcagcgtcggtagcggatttattatgggcaatgcgatgccgcaactgcgcgcggagctcccgcatttaccggtgattggacattgccgaaatcaggctgtctctcactatttgacgcactggctggactatccacatctaccttattcccccgaataacgagatcccttccagcaccgggcaattgcccggttttttttgcgttgaatttgtcattttgtgccgtggtgtttaaaccgcacagaataaattgtcgtgatttcacctttaaaataaaattaaaagagaaaaaaattctctgtggaagggctatgttagataaaattgaccgtaagctgctggccttactgcagcaggattgcaccctctctttgcaggcactggctgaagccgttaatctgacaacccccccttgctggaagcgcctgaaacggctggaggacgacggtatccttatcggcaaagtcgccctgctggatccggaaaaaataggcctcggcctgaccgcttttgtgctgataaaaacgcaacatcacagcagcgaatggtattgccgctttgtcacggtggttaccgaaatgccagaagtgctggggttctggcgcatggctggtgaatacgattatctgatgcgcgtccaggttgccgacatgaaacgctacgacgagttttataagcgtctggtaaacagcgtgccggggctgtcggacgtcacttccagcttcgcgatggaacagattaaatacaccacttctttacccatcgaataaatatccagaatcaggtcaggacacaacgcgtgcgattatttgctcaattaagctggtatttccgtcgggaatggcgtcgctatctcggggctgtcgccttgcttgtcattatcgcgatgctgcaactggttccgccaaaagtggttggtattgttgtcgatggcgtgacagaacaacactttactaccgggcagatcctgatgtggatcgccaccatggtgctgattgccgttgtggtttatctcctgcgttacgtctggcgggtattgctgtttggtgcgtcttatcaactggctgttgaactgcgtgaagattattaccgtcagctaagccggcagcatcctgagttttacctgcgtcatcgcaccggtgacctcatggctcgtgcgaccaatgacgtcgatcgcgtcgtgtttgccgccggagaaggggtgctgacgctggtggattcactggtgatgggctgcgctgtgttgattatgatgtctacgcaaattagctggcagttgaccttattttccctgttgccgatgccagtgatggcgatcatgattaagcgcaacggcgatgctttgcatgaacgctttaagctggcacaggcggcgttttccagtcttaatgaccgcacccaggaaagcctcaccagtatccgcatgatcaaagcctttggtctggaagatcgccagtcggcgttatttgccgcggatgccgaagataccggcaaaaaaaacatgcgggtggcgcgtattgatgctcgtttcgacccgaccatctatatcgcgattggtatggcgaacttgctggcgattggcggcggtagttggatggtggtgcagggcagtttaacgctgggccagctcaccagttttatgatgtatttaggtctgatgatttggccaatgctggcgctggcatggatgtttaacattgtggaacgtggtagtgctgcgtacagccgtattcgcgcgatgctggcggaagcgccggtggtgaacgatggtagcgaacccgtgccggaagggcgtggcgaactggatgtaaatattcaccagttcacgtatccgcagactgaccatcctgcgctggaaaacgtcaatttcgccctgaaacccggtcagatgctgggtatctgcgggccgactggttccggcaaaagtaccctgttgtcgctcattcagcgtcatttcgacgtcagcgagggggatattcgctttcatgatattcctctgacgaagttacaactcgatagctggcgtagccgcctggcggtagttagccagacgccattccttttttctgacactgtggcgaataacatcgcgctgggttgcccgaatgccacccagcaagagattgagcatgtcgcgcggttagccagcgtacatgacgatattttgcgtctaccgcaaggttacgatacagaggtgggcgagcgcggtgtgatgctttccggcgggcaaaaacagcgtatctccattgctcgtgcgttattagtcaacgcggaaatcctcatccttgatgatgcgctttcggcggtggacggacgcactgagcaccagatcctgcataacctgcgtcagtgggggcagggaagaacggtaatcatcagtgcccatcgcctttctgcactgacggaagccagtgaaattattgtgatgcagcacggacatatcgcccagcgtggcaatcatgatgtgctggcacaacaaagcggctggtatcgcgatatgtatcgctatcaacaactggaggcggcgctcgacgacgctccggaaaatcgcgaggaggccgtcgatgcgtagttttagccaactgtggccgactctcaagcgcctgttagcgtacggttcgccgtggcgtaaaccgctggggattgcggtcctgatgatgtgggttgcggcggcggcagaagtcagtgggccgctgcttatcagctattttatcgacaatatggtagcgaaaaataacctgccgttgaaagtggttgcagggctggctgcggcgtatgttgggctgcaactgtttgccgccgggctacattacgcgcagtcgctgctgtttaatcgggcggcagtaggcgtagtgcaacagttgcgtaccgacgtgatggatgctgcgttacgccagccattaagcgagtttgatacccaacccgtcgggcaggtgatttcccgcgtcactaatgacactgaagtgatccgcgatctctacgttaccgtagtggcaactgtcctgcgcagtgccgcgctggtgggcgcgatgctggtggcgatgttcagcctcgactggcgaatggcactggtggcgataatgattttcccggtggtgctggtggtaatggtgatataccagcgttacagcacgccgattgtccgtcgtgtgcgcgcctatctggcggatatcaacgacggctttaacgaaatcatcaatggcatgagcgttatccagcagtttcgtcagcaggcgcgatttggcgaacgtatgggggaggccagtcgttcacactatatggcgaggatgcaaaccctgcgcctcgacggttttctgctgcgtccgctgctgagtctgttttcatcgctcattctttgtggcttgttgatgctgtttggcttctccgccagcggcaccattgaagtgggcgtgctgtatgcgtttatcagctatcttgggcgacttaacgaaccattaatcgaactgaccacgcaacaggcgatgctgcaacaggctgttgttgctggtgagcgcgtgtttgaactgatggacggaccgcgccagcaatatggcaatgatgatcgcccgttacagagtggcaccatcgaagtcgataacgtgtcatttgcttatcgcgatgacaatctggtgctaaagaacattaatctctctgtgccttcgcgcaattttgtggcgctggtcgggcataccggcagtggcaaaagcaccctcgccagtttattgatgggctattacccgctaacggaaggtgagattcgccttgatggtcgtccattaagttcgctaagtcacagcgcgctgcgccagggcgtggcaatggtgcagcaagatccggtggtgctggcggataccttcctcgccaacgtgacgctggggcgggatatctccgaagaacgcgtctggcaggcgctggaaaccgtgcaactggcggagctggcgcgtagcatgagcgacggtatttacacgccgctgggcgagcaggggaataatctctcagttgggcaaaagcaactgctggcactggcgcgcgtgctggtcgagacgccgcaaatcctgatccttgatgaggcaaccgccagcattgactccggtactgaacaggcgattcaacatgctctggcggcggtgcgtgaacataccacgctggtagtgattgctcaccgcttatcgaccattgttgatgccgacaccattctggtgcttcatcgtgggcaagccgtggagcagggcactcaccagcaactgctggcggcccagggacgctactggcagatgtatcaactgcaacttgcgggcgaagagctggcagccagcgtgcgtgaagaggaatcattgagcgcctgaatagcgcaatatttcatcgttggtgcaaaaatgtaacgcactgtgcactgtcatagtgcgttttcattttcaaacttcttaacttcctgctctctttctcgtttttcatttctggcacaccgcttgcaataccttcttcgtgtagcagaaccattaccgaattctgaccggaggggatctatgaagctggtgaccgtgataatcaaaccattcaagctggaagacgttcgtgaagcgttatcttccattggtattcagggcctgaccgtcaccgaagtgaaaggtttcgggcgtcagaaagggcatgccgagctgtaccggggggcggaatacagcgtcaatttcctgccaaaagtaaaaattgatgtggcgattgctgatgaccaactcgatgaagtgatcgatatcgtcagtaaggcggcttacaccggaaaaattggcgacggcaaaatcttcgtcgctgaattgcaacgcgtcattcgtattcgtaccggcgaagccgacgaagcggcgctgtaatctctggcacacagcaacaggaacgaaaaatgaagatagcgacgataaaaactgggcttgcttcactggcgatgcttccgggactggtaatggctgcacctgcggtggccgataaagccgacaatgcgtttatgatgatttgtactgcgctggtgctgtttatgactattccggggattgccctgttttacggtgggttgattcgcggcaaaaacgtgctgtcgatgctgacgcaggtgacggtgacatttgcactggtctgtattctctgggtggtttacggttactcgctggcgtttggtgagggcaacaacttcttcggcaacattaactggttgatgctgaaaaacatcgaactgacggcggtgatgggcagcatttatcagtatatccacgtggcgtttcagggatcgtttgcctgcattaccgtcggcttgatagttggggcgctggcggaacgaatccgcttctcagctgtgttgattttcgtggtggtatggctgacgctctcttacattccgattgcgcatatggtgtggggcggtggtttgctggcttctcacggtgcgctggatttcgcgggtggcaccgtggtgcacattaacgccgcaatcgccggtctggtgggcgcgtatctgataggaaaacgcgtgggcttcggtaaagaggcgtttaaaccgcacaacctgccgatggtcttcaccgggactgccattctctatatcggttggtttggctttaacgccgggtcagcgggcacggcgaatgaaatcgcggcactggcatttgtgaatactgtggtcgcaacggcggcggcaattcttggctggatcttcggtgaatgggcgctgcgtggtaagccttcactgctgggggcgtgttctggcgcgattgccggtctggtcggcgtgacgccagcctgcggctacattggggttggcggcgcgttgattatcggcgtggtagctggtctggcgggcttgtggggcgttaccatgctcaaacgcttgctgcgggtggatgatccctgcgatgtcttcggtgtgcacggcgtttgtggcattgtcggctgtatcatgaccgggatttttgccgccagctcgctgggcggcgtgggcttcgctgaaggtgtgacgatgggccatcagttgctggtacagctggaaagcatcgccattacgatcgtctggtccggtgttgtggcatttatcggctacaaattggcggatctgacggttggtctgcgtgtaccggaagagcaggagcgagaagggctggatgtcaacagccacggcgagaatgcctataacgcgtaacaagcactgcaaaaaacagccggacggttttcacctccggctatttttttaattgtgattacgcatcaccccttcctgaacggtcgaggcaaccagtacgccgtcttgggtataaaactcaccgcgcacaaagccacgtgcgctggacgccgaggtgctctccacgctatacagcagccattcattcaaattaaacgggcgatggaaccacatggaatggtcaatggtggcaatctgaatccccggttcgagaaaaccgatgccgtgcggctgtagagctaccggcaggaagttaagatcagaagcgtaaccgagcagatactgatgaacgcgcaggtcatccggcacgctaccatttgcgcggatccacacctgacgatgtggttctgcgacgtgacctttcagtgggttatgaaactccaccggacggacttccagcggacgatcgcagatgaatttatctttcagcactggcggcagcaggtgcgccagcgattgggcgatttgcgtttccgaaggtaggccatcaggcgctggcgcggacggcattgttttttgatgttcgaaacccgcttctggtgcctggaaagaggcagtcatataaaaaatcggtttgccgttttgaatagcagcaacccggcgggcgctgaagctgttaccgtcacgcagcgtttcgacatcataaataatcggcttcttactatcgccagggcgaagaaagtagctgtgaaacgaatgtaccagccgctcttcagggacggtctcttttgcagcatacaaggcctgacccacgacctggccgccaaacacctggcgtaaacctaaatcttcactctggccgcgaaagagtccttcctcaattttttccagatttaacaatgtcagtaaattttttagcgcctgactcatataactctccagtaacaaagctgccgcagcaagccaaagtgagttgagtataacgcaaatttgctactggtccgatgggtgcaatggtctgaattacgggctaattacaggcagaaatgcgtgatgtgtgccacacttgttgacgttactattttgttaaccactcttccggcgaggaaagttagcccgctggtgcattgataataaggagaaatgaatgaaactcgtgcacatggccagtggtttagcggttgcgattgcgttggcggcttgcgcagataaaagcgcggatattcagacgccagcaccggctgcaaatacgtctatttcagcaacacaacaaccagctatccagcaaccgaatgtctccggtaccgtctggatccgtcagaaagtcgcactgccgcctgatgctgtgctgaccgtgacactttctgacgcgtcgttagccgatgcaccgtcaaaagtgctggcgcagaaagcggtgcgtactgaaggtaaacagtcaccattcagctttgttctgccatttaacccggcagatgttcagccgaacgcgcgtattctgttgagtgcggcgattaccgtgaatgacaaactggtatttatcaccgataccgttcagccggtgatcaaccagggcggaactaaagccgacctgacattggtgccggtacagcaaaccgccgtgccggttcaggccagcggtggcgcaacgactaccgtaccttcgacttcaccaactcaggtgaatccgtcttcggcagttccagctcctacgcaatattaagcgacgttaaccctctccgcccggagagggttagtagttccagcgataacgctgcaagtcgatttgcccgcttcccgataccatcacaccttctgccagtaatgcctgtcgctgacgctgtaaatccggtccggttagcgaaattgtgccgtggcgattaaccacccggtgccagggtaaggtgctgccttcagggagacgctttaacacaccgcccacctggcgcgcggcgcggggcgatcccgccagtttcgccacatcaccgtaagtggtgacatagccttcgggaatagcggcgacgatttgccagacgcgttggggaaatgaatcttctttttccatcttttcttcctgaggtaatttttcagcataatctggaaaaacgcccgagtgaagtcgcattgcgcaagaaaccagcatctggcacgcgatgggttgcaattagccggggcagcagtgataatgcgcctgcgcgttggttctcaacgctctcaatgggggctctgttggttctcccgcaacgctactctgtttaccaggtcaggtccggaaggaagcagccaaggcagatgacgcgtgtgccgggatgtagctggcagggcccccacccatttctgcctcccaccgtttcgtcaaaaaatcccaacatggctaaactttaaccacaactgacgtcgcaagaattgtctggctgcgcagtacgcttcggaggtatgtctgatgaagtatgttgatggttttgtggttgccgttcctgccgataaaaaggatgcctatcgggaaatggccgctaaggctgcgccattgtttaaagagtttggcgcgcttcgtattgtcgaatgctgggccagcgatgtaccggatggcaaagtgaccgattttcgtatggcggtgaaagcggaagagaatgaagaggttgtctttagctggattgaatacccttcaaaagaggtccgcgacgctgctaatcaaaagatgatgtcggacccacggatgaaagagttcggcgagtccatgccgtttgacggcaagcgaatgatctatggcggattcgagtcaatcatcgacgaataggtagcgtgacgggctgtgcggcgtgccgtcagcccaaaaattcacaaatgttgctcggcccagcgtaagaaatcttctttcggtaatgccttgctgtagagccagccctgaccgtagtgcacgccatgctggcgtaaccactcttcttgtttactggtttcgattccctccgctaccattttcagtttcagtgtttttgccatttcgatgatatgcggcgtgacatttttatattccagcgcatcaacgaaagatttatcgatcttcagaatgtcgacatccagatcctgtaaataacttaaacttgaataccccgtaccaaaatcatcaagataaatttcatggcccgcctcccggtagcgagaaattatcggggcgctggttttcggatcggcaaactcgcgttcagtgagttcaagcgcgatctgtctgggattaacctgatagtgattgatcatgtcacgcagcaattgcgggattttttccgaggtgagcacgggggattcaagattgatcgaaatatgctgctgtggatgctgatgcagccagtcgcccatatcttcaaagacgcttcttataatcagtagcgtcaatggctcagaaaggcccgtttgctgtgccagcggaataaaactatctggtgacaaccaactaccgtctgtctgcggccagcgcgccagtgcctcagcaccgacaattttgccattggctaaggagacaatcggctgatagtgcacgcaaatatcacgattttcgatagcatcctgcagccgatgatgcggtgactgaatacggcgcaaaatacgcagcacaaacatcgctgccagcaggccaatcaccaacccgagcggtaaccaaataaagacttgccgatgccagcctttctgcaacattttcgttgaagcccatgtgatgatcgaaatattcatctccggtaagggcaggatatcgtaaatgattccattattttcgatatgctcaccgggtgttttttgtagcctggtaataattccctgagcaatttcatcgctgctggttatgacaacgttatgggcattgccaataatggcggcatcaatttgccatgagctatagggaatgacatcaataaaggaagcggggtcgatcatgacgacataatgtgccgttcccatggcgaccatgtaacggataatgcctaaatcgttatgcgatgttaaccagacacgataaccatctttcgaaattttacctggctcggggaaggtatcgggcggactttcatgctccagagacgaacactggggaacgttgttatcgatataagccacttcctgaatatagcgataactgtaagatacccgacgcatttccatgagatgggcttcgctacaggcagcgccttgccatctttccagctcctgcagcgcatctttcccttgtgtcgccaccttattggctcgaatagcgacgcgggaggaataggtatccagctcttcaataaacgatgtttctacctgctgatgggccagccagatgcttaagccgacaggcagcaatactgaaagaatcagtactcccgaaataaggccgaccagatgtcgtgttctcaccagcatatccttattaacacagtgtagggaaagtatatctgattgtggaaaaaggctggctggagataaggaggtagagctggtatttcatgaagtgatgggtggaaacgatcattgtcatttgaccaggcgcagagctttacgcctggtatgtaaccctaacttaagatgttgattcggcgcgagcgagggtaaaaatatcgtaaaaagacagttcacctttacggacgatcattttttgcagttgttccttatgaacatccgcgacacgcggagagttcaagatggcttcaaccagcgcggcaggtacaaagcgcgtgttgtaccattcgccgttatagcaaacgcggaaatccagcacgtcgatatcttcatagcggtagcgtgggtagacatcgaaaaagaagaaaccattaagcaggataaataatacaaccagtagccagacagagcctgacagcgtttcggactgcaacatcaccgccagggtggcaaaaaaagcaacgtacataccgataaacagccccggatgtttacggataaaactgatactaaagcggggtttgttgtcgcgtttttcgcgggtattcagagactcaatcgtttcggtcagcaggcgttgtatttcggtcatcgtttgccttcgtggtatctgcaactttccagggaacaccctattttaacgtgggaatagtagaggggaagtaacagatctaccacaattttgcataacagttgcgaaaaaccgattacaattttttaattattctggctggattaccgcccacgacaacgttgtccgggacatcttttgtgacaactgcacctgaggctaccacgacgttatcaccaatggtcacaccagggttaatgaccgcgcgtccgccaatccagacgttattaccgatggtgacgggtttccccagttcagcaccgctattacgtgctacagggtcgatgggatgtgttgccgtgtagatatgaacgcctggtgccaacatacagttatcaccgatgcgaatagggcagacatcaagcatcacgcaatcgaagttggcgaaaaaattattaccgagaaaaatgttatagccatagtcacagcgaaacgttggctcaatataagcctctgtcacctgaccgaatagatcagcgagaatttgctggcgtaatgtgtgctcttccgccagggaatgattgtatcggtgaataagctgacgagcgcgcaggcgatcgcgagataacgtctcatctgccgagcgatacaactcaccagcaatcatcttttctttttctgtgctcattactgacctccggttgctgaaaatgcggcaacacagtaagacgaaaagtcagtgaagagaacgttcccattacatctgtgtgataaagatcacatagggtatgtcttcatggcgaaaaagtataaaattcttaataaacagccggttatagctccgaaagcgaattatttattagcgaataaatttccatactgaggaagggatcttgtcgtacagtttattcatggtcaattcggcgaggcggtgatctgcggctgagtaaaataccgccagttcattatctgataattcgtatttatttttctcgataacacgctccagcgtgtcaattgtctggcaacgacgtaaacgcattaaataatcggttttcgttaaaggtttttcggacatacttctacctatggttgtaataattctaacaagataaactcgcaggattctctttcgtcgcattgacaaaacaacggaatagtcgattacctgacttccgccatttctgaagatcctgcatattaataccataactactgaacaacataaaggtgtcatccagatattcgtcgatctgctcaatgagcttattgtcttcattatacttaattttgtaattaagtgcgaaggtcgcaatatgctcaatcagttcattcaactggaggttgatcgccgaggttgggtcgtttacccagccatgattgctttcttcaaggtttgcaaggcagtcatgatacagggtttcacagagaaacttaagctgtgcgatatcatgtcttttgggtgagtattcatccataacgcgtccccttcttagcggttgaactaacggacacctttcgggatggaaaaaacttactgacctggacttgccctctcgtttgttagcttaactataagccactctttgcaggttttcatcgcattattacgaaaaattacaattaggaaggaagcgggacaggactcactttttcatactagcactaacccgcagcaggtaaaagcagtttgctcgaactattcataacatttcaggattatcgccagatgaaattggtgacactaataccaggattgctctgaatatgacgtaataaccgaggaatgaataaagaattaccgcaaataattaagaatagcctctaaatgattatggattattaaatctattagcgctacttaatataaattaactaacaatcagtattttttatgaattttatccgtggttaatactggttttcgtatgagatcctgagttggtggttcaattactccttaatgttcgtaggttatgcataaaaaaggccgcttacgcggccttagtgattacacgttgtatcaatgatgatcgacagtatggctgtgctcgatatcttcattcttgcggctaaagcggcggcgaaccaccacaaagaataccggaacgaagaagattgccagtaccgttgcggtcaccatcccgcccattacaccggtacctactgcgttctgcgcgccggaaccagcaccagtactgataaccagcggcataacgccgaggataaacgccagcgaggtcatcaggatcggacgtaaacgcatccgcaccgcatcaagcgtcgcttcaatcagacctttaccttctttatccatcaagtctttggcgaattcgacgataaggatcgcgttcttcgccgacaacccaatggttgtgagcaggcctacctggaagtaaacgtcattggtcaggccacggaaggtggcagccagcaacgcaccgataacccccagcggaacgaccagcataacggagaacggaatcgaccagctctcgtacagcgccgccagacacaggaacacgacaatcaacgaaatcgcgtacagtgaaggtgcctggttgccggagagacgttcctgataggacatccccgtccagtcatagccaacaccggtaggcagtttgctcgccagttgttccatcagctccattgcttcaccggtacttttacccggtgccgcctggcctaagatttccatggatggcaggccgttgtaacgttccagacgcggcgaaccgtactcccaacgagaagaggagaacgccgagaatggcaccatctgaccatcagcagcacgaacataccagtcgccgatatcatccggcagcatacggtatttcgcttctgacatgacataaactttcttcacacgaccgcggtcgataaagtcgttcacatagctgccgccccatgcagcgcccagagtggtgttaatgtcgttgatagaaacacccagcgcctgcgctttttcctggtcgatatcaatcttaaactgcggggtatcttccagaccgtttggacgtacgctggtcaacatatcagggtgcttcgctgcttctgcaagcaactggttacgcgcctgagtcagtttttcgtgaccaaggccagcctggtcaatcagctcaaagtcaaagccggttgcagtacccagttccacgattgcgggcaggttaaaggcgaaaaccatcgcatctttgatttgcgagaaagcgcgtgttgcacgcatggtaatcgcttcaactttgttttcttcgcccggacgatcggcccagtccttcaaggaaacgaacgcaataccggtattctgaccacgtcccgcaaagccgaagccgttaacggcgaacaccgactcaacgttgttcttttctttggtcagatagtaatgcgttacctcattgagcactttctgtgtacgttcctgcgttgcacctgctggcagctgaaccatggtcataaacacgccctggtcctcatctggcaagaaggagcttggcagacgcacgaacagataggccatgccgaccacgatgatcagatacagcaccaggtaacgccccgtactgcgcagaataccgcctacgctgtcggtgtagtggtgcgtgctcttctcgaacatgcggttaaaccagccgaagaagccttttttaccttccccgtgatcgcctttggcaatcggtttcagcatggtggcacaaagagctggagtcaggatcaacgccaccagtaccgacagcgccattgctgaaacaatggtaatagagaactgacgatagatagcaccagtagaaccgccaaagaaggccatcggtacgaataccgccgacagtaccatcgcgataccgaccagagcgccctgaatctgccccatcgacttacgggtagcttcttttggcggcaaaccttcttccgccataacacgctcaacgttttctaccacaacgatggcgtcatccaccaacaggccgatggcgagcaccatcccgaacattgttagcgtgtttatcgagaagccaaaggcggcaaggacggcaaaggtcccgagcaataccaccggtacggcaatggtcggaatcaacgtcgcgcggaagttctgcaggaacagatacataaccaggaacacgaggatgatcgcttcgaccagcgttttaaccacttcgtgaatagagattttcacgaacggcgtggtgtcgtatgggtaaacaattttcagacccgacgggaagaacggttccatcttcgccagttcagcacggattgccgcagcggtatccagcgcgtttgcaccggtcgccagcttgatccccagaccggaagccggttggccgttaaactctgcgatgatgtcgtagttctcaccacccagctcaatcttcgcgacgtcacgcagcagcacgcgggaaccatcctgattcactttcagcaggattttgccgaactcttcagtagaggtcagacgcgtctgagcaataatagaggcgttaagctgttggcctttcaccggcggcgtaccaccgagctgacccgccgcaacctgggcgttctgcgctttgatggcggtaatgacatcaaccggcgttagctggaatttgttcagctcattcgggttcatccagatacgcatcgcgtactgtgaaccgaacaactgaacatcacccacgcccgacgtacggctgatggcatctttcatattcgccgccacgtagtcggagatatcctcctgcgtcatggtgccatcggtgttgataacgccgacaaccatcaggaagctgctggatgatttctcaacgctcaccccttgctgctgaacttcttgcggcagcaacggcatcgccagctgcagtttgttctgcacctgaacctgcgcgatatccgcatcagtaccagactcaaaggtcagggtgatctgcacggtacccgtggagtcactgttagaggacatgtacatcaggttatcgataccgttcatattctgttcgataacctgtgtcaccgtgtcctgcactgttttcgcatcagcgccggggtaggaggcggagatcgttactgccggcggtgcaatcgtaggatattgcgccaccggcagtttgaggatcgccagcccccctgccaacatgatgataatggcgatcacccacgcaaaaatcgggcgatcgataaagaaattaggcatgtcttaacggctcctgtttaagttaagacttggactgttcaggctgagcaccgcttgcggcttgctggttattatcagcggtaacttcttgtgcttttacctggacaccaggacgcactttctgcagcccacttattactacgcgatcgcctgctttcagaccttctgtcaccagccacttatcgccaatagcctggcttgcaacgatcggacgggtttccactttgtcatccgcgccaactaccagtacggtggcatcgccacgcggcgtacgggttacgccctgttgcgggactaaaatagcgtttggattaagcccttcttccagacgtgcgcgcacgaacatacccggcagcagagtgtgatccgggttcgggaagatagcgcgtagggtgatagacccagtggtctgatcaacggtaacgtcagagaattccagcgtaccgtcctgcgggaacttaatgccgtcactggtgatcagtgacactttggctttgccgttctcttgtttcagcgtgccattcgccagttcctgtttcaggcgcaggaagtcgttgctggactgggtcacatcaacgtagatcggatcaagttgctgcacggttgccagcgcagtcgcctgaccgttctgtaccaatgcgccttccgtcacgttcgacttaccaatgcgaccgctaatcggagaggtgactttggtgtaagccagattgatccgcgcagtttcaacggcagctttcgccgcagttaccgcagcattcgcctgttgcgcatcagccagagcctgatcgtactcttgcttactgatgtactgagtaccgagcagtttctgataacgattcaccgtcaattgcgcgatattggctgcagcctgggctttcgccagatcacctttcgcactgtcgtatgtcgcctgataggtcgcaggatcaatctgatagagagagacacctgcttcgatgtcgctaccttctttgaaattacgcttcaggataatcccgctaacttgaggacgaacttctgcgatccggtaggcactggtgcgacccggaagctcggttgtgatctgcagaggttcagttttgactgttactacgccaacggcgggcatctgctggccaccttgttgggcctgtttgtcgtcacatcctgttagggctaagctgcctgagagcatcagaacgaccgccagaggcgtaaaccctctgtttttgttcatatgtaaacctcgagtgtccgatttcaaattggtcaatggtcaaaagttaataaacccattgctgcgtttatattatcgtcgtgctatggtacatacattcacaaatgtatgtaaatctaacgcctgtaaattcacgaacatatggcacgaaaaaccaaacaagaagcgcaagaaacgcgccaacacatcctcgatgtggctctacgtcttttctcacagcagggggtatcatccacctcgctgggcgagattgcaaaagcagctggcgttacgcgcggtgcaatctactggcattttaaagacaagtcggatttgttcagtgagatctgggaactgtcagaatccaatattggtgaactagagcttgagtatcaggcaaaattccctggcgatccactctcagtattaagagagatattaattcatgttcttgaatccacggtgacagaagaacggcgtcgattattgatggagattatattccacaaatgcgaatttgtcggagaaatggctgttgtgcaacaggcacaacgtaatctctgtctggaaagttatgaccgtatagaacaaacgttaaaacattgtattgaagcgaaaatgttgcctgcggatttaatgacgcgtcgcgcagcaattattatgcgcggctatatttccggcctgatggaaaactggctctttgccccgcaatcttttgatcttaaaaaagaagcccgcgattacgttgccatcttactggagatgtatctcctgtgccccacgcttcgtaatcctgccactaacgaataaccctgaatctgactccaggatttttcctggacattttcgtcgttgctattctggttcactgcgtcgtgatattcttgcggtttgactttttcaggtcgttcttcaggttcagaaaccttcattcatcatgactatgttccagtattacaaacgatcacggcattttgttttttcagcatttattgcttttgtttttgtcttgttatgccagaacacggcgtttgcgcgggcgtcatcgaatggtgatctgccgacaaaagcggacctgcaggcgcaacttgactcactaaataaacaaaaagatctttctgctcaggacaaactggtgcagcaggatctgacagatacattagccaccctcgataaaatcgatcgcataaaagaagagacagttcagctacggcaaaaagtcgctgaagcgccggaaaaaatgcgccaggcgaccgcggcgttaacagcacttagcgatgtcgataacgacgaagaaacgcgcaaaattctgagcacgctgtcgttgcgccagctggaaactcgcgttgcccaggcgctggacgatttgcaaaacgcacaaaacgatctggcgtcttataacagccagctggtttcgttacagacgcagcccgaacgcgtgcaaaatgcgatgtataacgcttcgcagcagctgcaacaaattcgcagtcgtctggatgggactgatgtcggcgagacagccttacgtcccagccagaaagtgttaatgcaggcccagcaggcgttgctgaatgcggagattgaccagcagcgtaaaagcctggaagggaacaccgtcttgcaggataccttgcaaaagcaacgtgattacgtgacggcgaacagcgctcgtctggagcaccagttacaactgttgcaagaagcggtaaacagcaagcgcctgactttaaccgaaaaaacggcgcaggaagccgtctccccggatgaagccgcgcgtattcaggctaatccgctggtgaagcaggaactggaaattaaccagcagttaagtcagcgtctgattaccgcgactgaaaacggtaatcagttgatgcagcaaaacattaaagtcaaaaactggctggagcgggcgctgcaatcggaacgcaatattaaagagcagattgccgtcctgaagggcagcctgctgttgtctcgtatcctttaccagcaacaacaaacgctgccctcggcggatgaactggaaaacatgaccaaccgcatcgcggatttgcgtctcgaacagtttgaagttaaccagcagcgtgatgcactcttccagagcgatgcgttcgtcaacaaactggaagaaggtcacaccaacgaagtcaacagcgaagttcacgatgcgttattgcaagtggttgatatgcgtcgcgaattgctggatcaactcaacaaacagttgggtaaccagctgatgatggccattaacctgcaaatcaaccagcagcagttaatgagtgtgtcgaaaaacctgaaatccatcctgactcagcaaatcttttgggtgaacagtaaccgtccaatggactgggactggatcaaagcgttcccgcaaagcctgaaagatgaatttaagtcgatgaaaatcacggtgaactggcaaaaagcctggcccgccgtttttatcgctttcctcgctggtttgccgctgctgttgattgccgggctgatccactggcgtctgggctggctgaaagcgtatcaacaaaaactggcttccgctgtgggttccctgcgtaacgacagccagctcaacacaccaaaagcgatccttatcgacctgatccgtgcgctgccggtgtgcctgattattctcgcggttggcctgattctgttgaccatgcagctcaacatcagcgaactgctatggtcgttcagcaaaaaactggcgatattctggctggtgtttggcctgtgctggaaggtactggagaaaaacggcgttgccgtacgtcacttcggcatgccggaacagcagaccagccactggcgtcggcaaattgtccgcatcagtctcgcattgctgcctatccatttctggtctgtggtggcagaactttccccgctgcatctgatggatgatgtgctggggcaagcgatgattttcttcaacctgctgctgattgccttcctggtatggccgatgtgccgcgaaagctggcgtgataaagagtcgcacaccatgcgactggtcaccattaccgtgctgtcgataatcccgattgcgctgatggtgctgactgctacaggctacttctacactacgctgcgtctggcaggacgctggattgaaaccgtttatctggtgatcatctggaacctgctgtaccagacggtactgcgtggcttaagcgtagcggcgcggcgtatcgcctggcgtcgtgcgctggcgcgtcggcagaatctggtgaaagagggcgcagaaggtgctgaaccgccggaagaacccaccattgcactggagcaagttaaccagcagacgctgcgtattaccatgttgctgatgtttgcgctgttcggtgtcatgttctgggcaatttggtccgatttgatcaccgtgttcagctatctcgacagcatcacgctctggcattacaacggcactgaagctggcgctgcggtggtgaaaaacgtcaccatgggcagtctgttgtttgcgattatcgcctcaatggtggcctgggcgttgattcgcaacctgcctggtttactggaagtgctggtgctctcgcgactgaatatgcgccagggcgcgtcgtatgccattactaccatccttaactacatcattattgctgttggtgcgatgacggtgttcggatcgctgggcgtctcttgggataaactccagtggctggccgcagcattatccgtaggtcttggttttggtttacaagaaattttcggtaacttcgtctccggtttgatcattctattcgaacgtccggtgcgtattggcgatacggtaaccattggtagcttctcggggacggtaagtaagatccgtattcgtgcgacaacgattaccgatttcgatcgcaaagaagtgatcatcccgaacaaagcgtttgttaccgagcgtctgatcaactggtcgttgactgacactactacgcgtctggtgatccgtctcggcgtggcctatggctccgatctggaaaaagtgcgtaaagtgttactgaaggcggcgactgagcacccaagggtgatgcacgaaccaatgccggaagtcttctttacggcatttggtgccagcacgttggatcatgagctgcgtctgtatgtgcgtgaactgcgtgaccgtagtcgtactgtcgatgagctgaaccgtactatcgatcagctgtgccgtgaaaacgacatcaacattgcctttaaccagcttgaagtgcatctgcacaacgagaagggcgatgaggtgacggaagtaaaacgcgactacaaaggcgatgacccgacgccagcggtagggtaaaaacgaaagggggcaacatttagttgccccgagattgctaacaaagtgcgcgttgttcatgccggatgcggcgtgaccgccttatccggcctacgaaaccgcaagaattcaatatattgcaggagcggtgtaggcctgataagcgtagcgcatcaggcagttttgcgtttgcccgcaaccttaggggacatttagcgaccccatttatttctcacttttccgcctcatcatcgcgcgttaatttcttttcataatcacgctttacaatatccagcgcgcgcagcacggtactggcagggatctgattttcctccagcagcacaatcaaatcgacagccagtttgacatcgtcaggggcattttccagtgacatattctctccattgctagcgggttaaacgcgctaacctgttttcgattttttccagcgcatggcggcagcgtgccaggcgcgcttcataggcttccacttcacgatgcagcgtttgctgttccacgagatcggtcacccgcgccagacgggctctgcgttcggcaaccatctcacgtagccgccgctcaaaatcctgatgctgaatacgtttacgctgccagcgggcaattttcggtggtgcactgtcccactcgcgcaatgaccaggcggaggcttcacgcgcgatggcttccagttgtgccgccagatgttccgccagccaggccacttgcggcagctgttgctgctcaactgcatgacgaagcgcagccagattatcgcccgcctcgtcgagacaagcctgtagtgttgtcgcacgagtctgaaaaagatgcctgtcgaaacgagcacttagcgtggcgaactgtgacaccggggcacaacgctgacgcagcgtagcgagctgtccttccagtttttccagcagcagggcggttttcacgataagacctcaatgaaaatgataattgttatgctaaagtagccactctgtaagctgacaacactcaatatgcaacgaatcattttaatcatcattggctggctggcggtagtgctgggtacgctgggcgtggtattaccggtattaccgacgacgccgtttatcctgctggcggcctggtgctttgcccgttcttccccgcgctttcacgcctggttgctgtaccgctcatggtttggcagctatctacgtttctggcagaaacatcatgcgatgccgcgcggcgtcaaaccgcgggcgattttgcttattttgctcacgtttgccatttctctgtggttcgtccagatgccatgggtgcgcatcatgttgctggtaattctcgcctgtttgcttttctatatgtggcgaattccggtgattgatgaaaagcaagaaaagcactgaagcacaacaatcgcagttgcaattattgcgtacagccagtacattctggcgttttcgagcacaggcgcaggcggtcaaaggttaaacaactgttacttttgatacgtttaaaacgcgccgtgagtaccaccgtaacaagcaggcatacacttatgaccgcgactgcacagcagcttgagtatctcaaaaatagcatcaaaagcattcaggactacccaaaacccggcattcttttccgcgatgtcaccagcttactggaagacccgaaagcttacgctctcagcatcgacttgctggttgagcgttacaaaaatgcgggcattaccaaagttgtcggcaccgaagcgcgtggcttcttgtttggcgctccggtagctctgggtctgggcgttggctttgtaccggtccgtaaaccgggcaaactgccgcgtgaaaccatcagtgaaacttacgacctggaatacggcaccgatcagctggagatccacgttgatgccatcaaaccgggcgacaaagttctggtggtggacgacctgctggcaaccggcggcactatcgaagcgaccgttaaactgatccgtcgtctgggtggtgaagtggctgacgctgcgttcattatcaacctgttcgatctcggcggcgaacagcgtctcgaaaaacagggcattaccagctacagccttgtcccgttcccgggacattaattatcgccagtcttgtgctgcccacgctacggacagcacaagatgtgcattcagcctcgccgttctgacggggctgtgttagcattaccccttcgtgaatccaccttccagcgtttcagagcctgccaatgagttatcaggtcttagcccgaaaatggcgcccacaaacctttgctgacgtcgtcggccaggaacatgtgctgaccgcactggcgaacggcttgtcgttagggcgtattcatcatgcttatcttttttccggcacccgtggcgtcggaaaaacctctatcgcccgactgctggcgaaggggctaaactgcgaaaccggcattaccgcgacgccgtgcggcgtgtgcgataactgtcgtgaaatcgagcaggggcgctttgtcgatctgattgaaatcgacgccgcctcgcgcaccaaagttgaagatacccgcgacctgctggataacgtccagtacgctccggcgcgtggtcgtttcaaagtttatctgatcgacgaagtgcatatgctgtcgcgccacagctttaacgcactgttaaaaacccttgaagagccgccggagcacgttaagtttctgctggcgacgaccgatccacagaaattgccggtgacgattttgtcacgctgtctgcaatttcatctcaaggcgctggatgtcgagcaaattcgccatcagcttgagcacatcctcaacgaagaacatatcgctcacgagccgcgggcgctgcaattgctggcacgcgccgctgaaggcagcctgcgagatgccttaagtctgaccgaccaggcgattgccagcggtgacggccaggtttcaacccaggcggtcagtgcgatgctgggtacgcttgacgacgatcaggcgctgtcgctggttgaagcgatggtcgaggccaacggcgagcgcgtaatggcgctgattaatgaagccgctgcccgtggtatcgagtgggaagcgttgctggtggaaatgctcggcctgttgcatcgtattgcgatggtacaactttcgcctgctgcacttggcaacgacatggccgccatcgagctgcggatgcgtgaactggcgcgcaccataccgccgacggatattcagctttactatcagacgctgttgattggtcgcaaagaattaccgtatgcgccggaccgtcgcatgggcgttgagatgacgctgctgcgcgcgctggcattccatccgcgtatgccgctgcctgagccagaagtgccacgacagtcctttgcacccgtcgcgccaacggcagtaatgacgccaacccaggtgccgccgcaaccgcaatcagcgccgcagcaggcaccgactgtaccgctcccggaaaccaccagccaggtgctggcggcgcgccagcagttgcagcgcgtgcagggagcaaccaaagcaaaaaagagtgaaccggcagccgctacccgcgcgcggccggtgaataacgctgcgctggaaagactggcttcggtcaccgatcgcgttcaggcgcgtccggtgccatcggcgctggaaaaagcgccagccaaaaaagaagcgtatcgctggaaggcgaccactccggtgatgcagcaaaaagaagtggtcgccacgccgaaggcgctgaaaaaagcgctggaacatgaaaaaacgccggaactggcggcgaagctagcggcagaagccattgagcgcgacccgtgggcggcacaggtgagccaactttcgctaccaaaactggtcgaacaggtggcgttaaatgcctggaaagaggagagcgacaacgcagtatgtctgcatttgcgctcctctcagcggcatttgaacaaccgcggtgcacagcaaaaactggctgaagcgttgagcatgttaaaaggttcaacggttgaactgactatcgttgaagatgataatcccgcggtgcgtacgccgctggagtggcgtcaggcgatatacgaagaaaaacttgcgcaggcgcgcgagtccattattgcggataataatattcagaccctgcgtcggttcttcgatgcggagctggatgaagaaagtatccgccccatttgatcgtaagcacagcttacgttcgtcatccttaacgtgattgagagagaaacctatgtttggtaaaggcggtctgggtaacctgatgaagcaagcccagcagatgcaagaaaaaatgcagaaaatgcaggaagagatcgcgcagctggaagtcaccggcgaatctggcgcaggtctggtaaaagtgaccatcaacggtgcacacaactgccgtcgcgtagagatcgacccgagcctgctggaagacgacaaagagatgctggaagacctggtggctgcagcattcaacgacgcagcacgtcgtattgaagaaacgcagaaagaaaaaatggtctctgtatcctccggaatgcagctgccgcctggctttaagatgccgttctgatgcaaaccagcccgctgttaacacagcttatggaagcactgcgctgtctgccgggcgttggcccgaagtcggcgcagcgtatggcgttcacgctgcttcagcgcgatcgtagcggcgggatgcgtctggcgcaggcgctcacccgggcgatgtcggaaatcggccactgcgccgattgccgcactttcaccgaacaggaagtctgtaacatctgttcgaatccgcgtcgtcaggaaaacggtcaaatctgcgtggtggagagtccggcggacatctacgccattgagcagacggggcagttttcaggtcgttattttgtgttgatggggcatctgtcaccgctggacggcatcggtccggatgatatcgggcttgatcgtctggaacagcgtctggcagaggaaaaaatcactgaagtgatcctcgccaccaaccccacggttgaaggtgaagctaccgctaactacattgccgagctttgcgcgcaatatgacgtggaagccagccgaatcgctcatggcgttccggttggcggcgagctggaaatggtcgacggcaccacgttgtcacactcccttgccgggcgtcataagattcgtttttaagcaaacgagagcaggatcacctgctctcgcttgaaattattctcccttgtccccatctctcccacatcctgtttttaaccttaaaatggcattattgaggtagacctacatgaaaggacaagaaactcgtggttttcagtcagaagtgaaacagcttctgcacctgatgatccattctctctattccaataaagaaatcttcctgcgtgagcttatctctaacgcctccgatgcggcggacaagctgcgtttccgtgcgctctctaacccggacctgtacgaaggtgatggcgaactacgcgttcgtgtctctttcgataaagacaagcgtacgctgaccatctccgataacggcgtggggatgacccgcgacgaagtgattgaccatctggggactatcgctaaatccggtaccaaatcattcctcgaatccctgggttctgaccaggcgaaagacagccagctgatcggtcagtttggtgttggtttctactctgcgtttatcgtggccgacaaagtgaccgtgcgtactcgcgcggcaggcgaaaaaccagaaaatggcgtcttctgggaatcggctggcgaaggtgaatacaccgttgccgacatcaccaaagaagatcgtggtactgaaatcaccctgcatctgcgtgaaggcgaagacgagttcctcgatgactggcgcgtgcgttccatcatcagcaaatactccgaccatatcgcgctgccggtagagatcgaaaaacgcgaagagaaagacggcgaaaccgttatctcctgggagaaaatcaacaaagcgcaggcgctgtggactcgtaacaagtcggaaatcaccgatgaagagtacaaagagttctacaaacacatcgcccacgactttaatgatccgctgacctggagccacaaccgtgttgaaggtaagcaggagtacaccagcctgctgtacatcccgtcccaggctccgtgggatatgtggaaccgcgatcataaacacggcctgaaactgtatgttcagcgtgtgttcatcatggacgacgcagaacagttcatgccgaactatctgcgcttcgtgcgtggtctgattgactccagcgatctgccgctgaacgtttcccgtgaaatcctccaggacagcacggtaacgcgtaacctgcgcaatgcgctgaccaagcgtgtgctgcaaatgctggaaaaactggcgaaagacgacgcggaaaaataccagaccttctggcaacagtttggcctggtactgaaagaaggtccggcggaagatttcgctaaccaggaagcgatcgccaaactgctgcgttttgcttctacccataccgattcttctgcgcagaccgtatctctggaagactacgtttcccgcatgaaagaagggcaggagaaaatctactacatcaccgcagacagctatgcggcagcgaagagcagcccgcacctggaactgctgcgtaagaaaggcatcgaagttctgctgctttccgaccgcatcgatgagtggatgatgaactatctgactgagttcgacggtaaaccgttccagtcggtgtctaaagttgacgagtcgcttgaaaaactggctgacgaagttgatgagagcgcgaaagaagcggagaaagcactgactccgttcatcgaccgtgtgaaagccctgctcggcgagcgcgtgaaagatgtccgtctgactcaccgtctgaccgatacgccagcgatcgtttcgaccgacgcggacgaaatgagcactcagatggcgaaactgttcgctgcggcgggccagaaagtgccagaagtgaaatacatcttcgaactgaacccggatcacgtactggtgaaacgtgcggcagatactgaagatgaagcgaagttcagcgagtgggtagaactgctgctggatcaggcgctgctggcagaacgcggcacgctggaagatccgaacctgtttattcgtcgtatgaaccagctgctggtttcctgatgtaatgccggatgaccttcgtgtcatccggcatttttcttttcatcatctgcactttccgcaaattatctcgccattaaccgtttcagccccaggtgcctttcttgaggcaatcgcctgttggtggtatcgtttatcgctttttcaaaaaattcgacacattttaaggggattttcgcaatgcgtatcattctgcttggcgctccgggcgcggggaaagggactcaggctcagttcatcatggagaaatatggtattccgcaaatctccactggcgatatgctgcgtgctgcggtcaaatctggctccgagctgggtaaacaagcaaaagacattatggatgctggcaaactggtcaccgacgaactggtgatcgcgctggttaaagagcgcattgctcaggaagactgccgtaatggtttcctgttggacggcttcccgcgtaccattccgcaggcagacgcgatgaaagaagcgggcatcaatgttgattacgttctggaattcgacgtaccggacgaactgatcgttgaccgtatcgtcggtcgccgcgttcatgcgccgtctggtcgtgtttatcacgttaaattcaatccgccgaaagtagaaggcaaagacgacgttaccggtgaagaactgactacccgtaaagatgatcaggaagagaccgtacgtaaacgtctggttgaataccatcagatgacagcaccgctgatcggctactactccaaagaagcagaagcgggtaataccaaatacgcgaaagttgacggcaccaagccggttgctgaagttcgcgctgatctggaaaaaatcctcggctaattcgaaagcgcgcacggacagtcccctcgccccctcggggagagggttagggtgaggggaacaggcccgcacaagcaaacttatcagcaatctcaggccggatattcattcggccttttacaaaaacctcaatctgcgctattcctttttctgatttgacctctcacagcaattagttcttcttcctcacttttccgctacaattatcaacaagttgaatcgataagaggcggtaatgcgtcagactaaaaccggtatcctgctggcaaacctgggtacgcccgatgcccccacacctgaagcggtaaaacgctatctgaaacaatttttaagcgacagacgcgtggttgatacctcacggttgttatggtggccattgctgcgcggcgtgattttgccgctgcgctcgccgcgtgtggcgaagctgtatgcctctgtctggatggaaggtggctcgccgctgatggtttacagccgccagcaacagcaggcgctggcacaacgtttaccggagatgcccgtagcgctgggaatgagctacggctcgccatcactggaaagcgccgtagatgaactcctggcagagcatgtagatcatattgtggtgctgccgctttatccgcaattctcctgttctacggtcggtgcggtatgggatgaactggcacgcattctggcgcgcaaacgtagcattccggggatatcgtttatacgtgattacgccgataaccacgattacattaatgcactggcgaacagcgtacgcgcttcttttgccaaacatggcgaaccggatctgctactgctctcttatcatggcattccccagcgttatgcagatgaaggcgatgattacccgcaacgttgccgcacaacgactcgtgaactggcttccgcattggggatggcaccggaaaaagtgatgatgacctttcagtcgcgctttggtcgggaaccctggctgatgccttataccgacgaaacgctgaaaatgctcggagaaaaaggcgtaggtcatattcaggtgatgtgcccgggctttgctgcggattgtctggagacgctggaagagattgccgagcaaaaccgtgaggtcttcctcggtgccggcgggaaaaaatatgaatatattccggcgcttaatgccacgccggaacatatcgaaatgatggctaatcttgttgccgcgtatcgctaaagctgagcggtaaagaactgagcgccgtcgcgaagagcctcgtcggcggttttcatcatccgtgaataatgcaaaaaggcgtgcagcgtgcctgggtagagtttgaactcacagggctgctgatgcgccgctaacgtctggtaaagcagacggctgtcatccagcagcggatcgaactccgccccggcaataaaacagggcggaacttcgcgagtgagatcattattaaacagacagtaatacggcgactcgcggtccgcgtcgttgcttaaatatgcctcttcgtacatctgcaaatcctgttgcgttaagccatcccagacaccgcccaacagacgacgagtcacggaatcccgtaatccgtaaagcccataccacagcaaaacgcccgcaactttaccgcaatcgatctgtttatcacgcaaccacaacgcactggcgagcgccagcatggcacctgcggaatcaccggcaaagccaattcgggacatattgatttgataatcctccgcctgctggtggaaataacaacaagcagccacaatttcctctatcgcttgcggaaaacgcgcttcaggtgaaagggtgtaatcaataccaatcaccgtacattggctgtagcttgccagcaggcgcatgatgcgatcgtgggtatcgagattgccgagaataaaaccgcctccatgcaaataaaatagcgtcgctgggctatctggctgcggacaaaagagacgtgtttccacctgcccatattttgttggaaccatgtaagctctggttgccatttctggagcgcccgcattccagaatcggcgctcaagcgtgtaatactgtcgttgctcagcaatcgttcccgttgcgggccagggcggtaaatccggctgaagagtattcacaacggtcttcatttcagcagaaataaggtccagaacaggtagtttgttttccggcttcatacaaaaactcctttcaaattacgtcattgtaaggaaccactgccatgaaaatgcgatcccgcctgctgatattgaaactggctgcgtctcgcgcgctcccgtcagattgtgttaacattcgccgctcagttaaccacccgtaaaaacaaccatgaaatttcccggtaaacgtaaatccaaacattacttccccgtaaacgcacgcgatccgctgcttcagcaattccagccagaaaacgaaaccagcgctgcctgggtagtgggtatcgatcaaacgctggtcgatattgaagcgaaagtggatgatgaatttattgagcgttatggattaagcgccgggcattcactggtgattgaggatgatgtagccgaagcgctttatcaggaactaaaacagaaaaacctgattacccatcagtttgcgggtggcaccattggtaacaccatgcacaactactcggtgctcgcggacgaccgttcggtgctgctgggcgtcatgtgcagcaatattgaaattggcagttatgcctatcgttacctgtgtaacacttccagccgtaccgatcttaactatctacaaggcgtggatggcccgattggtcgttgctttacgctgattggcgagtccggggaacgtacctttgctatcagtccaggccacatgaaccagctgcgggctgaaagcattccggaagatgtgattgccggagcctcggcactggttctcacctcatatctggtgcgttgcaagccgggtgaacccatgccggaagcaaccatgaaagccattgagtacgcgaagaaatataacgtaccggtggtgctgacgctgggcaccaagtttgtcattgccgagaatccgcagtggtggcagcaattcctcaaagatcacgtctctatccttgcgatgaacgaagatgaagccgaagcgttgaccggagaaagcgatccgttgttggcatctgacaaggcgctggactgggtagatctggtgctgtgcaccgccgggccaatcggcttgtatatggcgggctttaccgaagacgaagcgaaacgtaaaacccagcatccgctgctgccgggcgctatagcggaattcaaccagtatgagtttagccgcgccatgcgccacaaggattgccagaatccgctgcgtgtatattcgcacattgcgccgtacatgggcgggccggaaaaaatcatgaacactaatggagcgggggatggcgcattggcagcgttgctgcatgacattaccgccaacagctaccatcgtagcaacgtaccaaactccagcaaacataaattcacctggttaacttattcatcgttagcgcaggtgtgtaaatatgctaaccgtgtgagctatcaggtactgaaccagcattcacctcgtttaacgcgcggcttgccggagcgtgaagacagcctggaagagtcttactgggatcgttaagttatcgtcggttcgtaggccagataaggcgttcacgccgcatctggcatttggctctcgatgcctgatgcgacgctggcgcgtcttatcatgcctacatatttttcatattttacatccggcaaccaccgtttaccccgtcaccacctcacccgccggtggcgtttccagcagttccagcatggtacgggcgatttcacgctcgcccatcactacctgattcgcaccacgttcggtgatatacgccacttcatcgtcataatgggcgcgggcaataatctcaatatccggatttttcgcgcgggcagatgccacaatctcacccgcttcataaccgttgggaatcgtcaggatcagccattttgcacattccagatgcgccagttgcataatttcttcgttcgccgcattgcccaatactgcgcggaccccgcgctctcgcagctcatcaacacgggttcgtgacgtctcaatcaccaccagcggaatatcagaggcgagcaatttctcccccagcaggctgcctacacgaccgtaacccaccagtagcgcatggttgcaaatatccactgggatctgcttctcttcttcgattgcctcttccagcgtctgctcttccagcgtttcggtcttcgccagatatttctccagtagtgcgaacagtaccgggttgagcataatcgacaggatcgcccctgccagtaccaggttttgtccggcctgcggcagtaaattcaatgccattcccagtcccgccaggataaacgcgaactcaccaatctgcgccaggctggcggcgatggttaatgccgtacgttgggagtgaccaaacagtcgcaccaggaaaaatgcggctaacgacttaccaaacagaataatcgccagcgtcgccagcactgccagcggttgctgaatcagaattaacggatcaaacaacatcccgacggagacaaaaaacagcaccgcaaacgcgtcgcgcaatggcagcgtatcgtgggcggcacggtgactcagttcagactcgttcagtaccatcccggcaaagaacgcaccgagtgcaaaggagacatcaaacagctctaccgcaccaaaggcaacccctaacgccagcgccagcaccgacagggtaaacagctcgcgagaaccggttgccgcgctgcgtgccataatccacggcaccagacggcgacctaccagcatcataatggcgataaatgcgatcactttgccgatggtgatccccatatcgactgcaagagtggcaaagcccacatcgccctgttccatcattcctgccactgcgggcagcaacaccagcgtcagaaccattaccaggtcttccacaatcaaccaaccgatggcgatttgcccacgctgactgtcaattaattgccgttcttcaagtgcgcgcagtaacaccacggtactggcggtggaaagacataaaccgaacacgataccggtcattaacgaccagcccagcacggcagagagcgccatacccagcagcgtcgccacggctatctgggcgatcgcaccgggaatggcgatggcctttaccgccatcaaatccttcagcgaaaagtgcaaaccgacgccaaacatcaacagaatgacgcccagttcagccagttccggggcaagcttggtatcggcaacaaagcccggagtgaatggtcctgccagcacacccgctaacagatatcccaccagaggagaaatacgtagtttattggccagcatgccgaggataaaggcgagcacaaggccgccaacaatggtggtgataagcggggtggcgtgatgcattccgtctccttttcctggtggttattgtccatttttggccgggaaaaccaaaattacaggtaatagtttatgacaatttcattgatgatgttcatgaataattattgaattttgcagaaaaatggaattagctgcaaaaaaagcacggatcggaaaacagaaggcggtttaacagaggaaaggcttatggcgactgtaaaacgatgcagccaaagtttgcctttggctgcaatgaaatcagtctttatgccggttatcaggcaggaatatggtcaacatccccaatagtggcaggaaagcacagattttatagactaactcgatgctggtgtgatcggcgataagccccagaactgccgctcccagacctcctatgccaaaagcaaaaccgaaaaagagtccagaaaccataccgatacgtcctggaagcagctcctgagcgtagaccagaatggcagagaatgccgaagcgaggataaatccaataatcaccgttaaaacccccgtccagtgcaggctggcgtagggtaaaatcagcgtaaacggcgcaacgccgaggatagagccccaaatcacatatttccgcccaattttatcccctacaggcccgccgatcaccgtacctgccgcaacggcaaacaggaaggcaaacagatgaagctgagcattctggatagataatccgaatttttgcatcagataaaaggtgtaatagctgctgatgctcgccatatagaaatatttcgagaaaatgaggattaacagaatgctgaccgccagtacaactttattgcgcggcagtggattgataatcgtcgctttgggttttcctttattcattcggtgctgtgccgagtaccaacggctgatttgcgccaacaccacgatcgccagcagtgccgcaagcacaaaccaggcaacgttgcttttgccataaggcgcgataatcaccgccgccagcaagggtcccagggaactgccaaagttgccgccgacctgaaagatagattgcgccaggccatgccgcccgccggaagccatacgggccacgcgagaagattccggatgaaagaccgatgaaccggtaccgaccagcgccgccgccagcagaactgcgccataactgcccgccagcgcaagcagcaccagaccgcttaaggtaaagcacatgccaattggcaacgaccatggcatcggatatttatcggtccagtagccgaccactggttgcagtagcgaagaggcgagctggaaggtgagggttatcatgccaatctgcataaatgtcagagaaaattctgactgaagcagcggataaatcgccagaatcagcgattggatcatgtcgttcagcagatgtgagaggctgatagcacctaaaataccaaacgatgttcgggccttggtcgttgacgcagccgcgcccgccacaggctggggttgttcactcattgccataggaaagtcactttttcagggttgcgatgtaaagaatgatcttatttgtgattattaccagactaacatacctgtatgcgtcgtctgaaggaagtctcaacgccgaatacagaatttctaatctggatgcagatttatcttcaccggacgcagacttgtctatgatgtcgcgtcatactatttttcaacacgttgaaatcaggtcagggagagaagtatgaaattattgcagcggggcgtggcgttagcgctgttaaccacatttacactggcgagtgaaactgctctggcgtatgagcaggataaaacctacaaaattacagttctgcataccaatgatcatcatgggcatttttggcgcaatgaatatggcgaatatggtctggcggcgcaaaaaacgctggtggatggtatccgcaaagaggttgcggctgaaggcggtagcgtgctgctactttccggtggcgacattaacactggcgtgcccgagtctgacttacaggatgccgaacctgattttcgcggtatgaatctggtgggctatgacgcgatggcgatcggtaatcatgaatttgataatccgctcaccgtattacgccagcaggaaaagtgggccaagttcccgttgctttccgcgaatatctaccagaaaagtactggcgagcgcctgtttaaaccgtgggcgctgtttaagcgtcaggatctgaaaattgccgttattgggctgacaaccgatgacacagcaaaaattggtaacccggaatacttcactgatatcgaatttcgtaagcccgccgatgaagcgaagctggtgattcaggagctgcaacagacagaaaagccagacattattatcgcggcgacccatatggggcattacgataatggtgagcacggctctaacgcaccgggcgatgtggagatggcacgcgcgctgcctgccggatcgctggcgatgatcgtcggtggtcactcgcaagatccggtctgcatggcggcagaaaacaaaaaacaggtcgattacgtgccgggtacgccatgcaaaccagatcaacaaaacggcatctggattgtgcaggcgcatgagtggggcaaatacgtgggacgggctgattttgagtttcgtaatggcgaaatgaaaatggttaactaccagctgattccggtgaacctgaagaagaaagtgacctgggaagacgggaaaagcgagcgcgtgctttacactcctgaaatcgctgaaaaccagcaaatgatctcgctgttatcaccgttccagaacaaaggcaaagcgcagctggaagtgaaaataggcgaaaccaatggtcgtctggaaggcgatcgtgacaaagtgcgttttgtacagaccaatatggggcggttgattctggcagcccaaatggatcgcactggtgccgactttgcggtgatgagcggaggcggaattcgtgattctatcaaagcaggcgatatcagctataaaaacgtgctgaaagtgcagccattcggcaatgtggtggtgtatgccgacatgaccggtaaagaggtgattgattacctgaccgccgtcgcgcagatgaagccagattcaggtgcctacccgcaatttgccaacgttagctttgtggcgaaagacggcaaactgaacgaccttaaaatcaaaggcgaaccggtcgatccggcgaaaacttaccgtatggcgacattaaacttcaatgccaccggcggtgatggatatccgcgccttgataacaaaccgggctatgtgaataccggctttattgatgccgaagtgctgaaagcgtatatccagaaaagctcgccgctggatgtgagtgtttatgaaccgaaaggtgaggtgagctggcagtaatccgaaagtgccggatgtttgcatccggcacaatgcttaatcgcggcgggcgatatcagcaaatttggcatcgaggatctttgccagatcgcctgccgccagttcgatatccagtccgcgcttgccgccggaaacataaatagtggcaaattcttgtgcgggggcgtcgataatcgttggcagacgttttttctgccccagtgggctaatccccccaaccaggtatcccgtcgaacgctgcgcgaccatcggatcggccatctcaactttcttggcacccagcgcttttgctacttttttaagatccagttgacctgcgaccggcgtaacggccacggcaaggtgtttcatatcaccgttcactgccaccagcagcgttttgtagacctgatccggattcaaacctaattttttgacgacttcatcgccaaaattggtttcagccggatcgtgctcgtaggtatggatttgaaacgaaatcttgtttttttcgagtaatttaactgcgggtgtcatggtaattttcctgccttaaacaaaaaaacgaagcaagcatacgcctgatggcggtccaaaaaaaagagtcatcttgcctaagagtattggcaggatggtgagattgagcgacaatcgagttacaccgtcgcttaaagtgacggcataataataaaaaaatgaaattcctctttgacgggccaatagcgatattggccatttttttagcgcaacatttgcggcaaattcccttctccatacaggtgtagtgcaccgaccgcgaccacatatcgccccggcggcatggcgcgtaatttatcccgccaggcgagatttcgctgatgcatcagcacatcgtacagcgactgactgaacgtattgggcagcgttatatcattattttgcggcggtgcattcagccaccagctcatcatttgttgcagcaaccgtgcgttggtatgccagtgggtcagcgtatcgtccagcagcgccagtcctttgtcagggagctggagcaacatggcaatctggttttcagccccttccagttcaatcacgggtttatgttgttgcttcgccgcctgcaatagctggtaatcgataccgtattctgcccgcagccccagtttttgtgcctgcgtcgcctgaagaaccatcgcgatttgccacagcggttgggtagaaaagagtgagggagaaatgcccatctcctggctaatgtgctgcaggttttggagttgctcctcgctaatgcgctcttccagcgcctcgcaggcaggcaaattagcaaaaggcgtatcgctggtggaaacatccgcctcgacgatcagcgcatcggcgtttttgagctttttgagcaaacgggtgggcaggggagccatatcgtggctacccatatgaatactgccaatcagatgaaaatggcgattgccggggagggtgatatcgatggcaggccaggtgtaatgattaccgcgcagcgcggcccaaagcgtttttacccggtacaacagatccatacgacctccctttgtgaaatatcatgctagcgcgcggtgagggatggcgcaaatggagttggagacttgtttaatgtgtttgtatgattcagtatgttcttgcatcgctattcacaaggaagcaacagttaaaaaccatgaaacaggcaacaagaaaaccgacgacacccggagatattcttctctatgaatatctggaaccgctcgatttgaaaatcaatgagttagcagagttgctgcatgttcatcgtaatagcgtcagtgcactgatcaataacaatcgtaaactcactactgagatggcatttcgtctggcgaaagtttttgataccacagtcgatttttggctaaacctccaggcggcggttgatctttgggaagttgaaaacaacatgcgcacccaggaagaattgggacggattgaaacagtggctgaatatttggcacgccgtgaagagcgtgcaaaaaaggtcgcgtaaggccaaaacatcgcttcatctcgtaggccggataaggcgttcacgccgcatccggcatccgagcaccattgcctgatgcgacgcttacccgtcttatcaggcctacaaacttgtgcctgaaccgtaggccggataaggcgtttacgccgcatccggcatccgagcaccattgcctgatgcgacgcttacgcgtcttatcaggcctacaaacctgtgcctgaaccgtaggccggataaggcgtttacgccgcatccggcagtcatgcgtcgatgccaaatgcgccaccctaaagcagcgcatccgcaatgatgtacttattccttcggtttaaaccgcagcaaccggttggcgttactcactacggtaatcgacgagagcgccattgccgctccggcaactaccgggttaagcagtgttccagtgaacggccacaaaataccggcggcgaccggaataccgatactgttgtagataaacgcaccgagcaggttctgcttcatgttgtgcagcgttgcgcgggaaatagcgagcgcatccgcaacgcccatcaggctatggcgcatcagggtaatcgccgcggtttcaatggcaacatcactgccgccacccatcgcaatgccgacatccgcctgagccagcgctggcgcgtcgttaatgccgtcgcccaccattgccacctgacgtccttcactttgcagatgtttgatcgcttcggctttaccgtccggcagcaccccggcgatcacctcatcaatccctgcttctttggcgatcgcattggcggtggttgggttatccccggtcaacatcaccagacgatatcccgctttatgcaggcgttgcagcgccgccacgctatcactacgcaacggatcgcgtactgccagcagggctaccgctttcccgtcaaccgccagcagcacaggcgttgccccttgcgatgcctgagcagtaatctccgcttcgatagctttggtaccaacctgttgctcatttaacagcgcctgattgcccagcaataacgcatgaccttcagcttcaccgctcacgcccagcccgcgcaatgtgcggaaaccgttgacctgcggtagctgcatatcacctgctttatcgaggatcgctcgtgccagcggatggctggaaccttgctccagtgccgccgccagacgcaatgcctgcgcttcatcaacatcagcaaatgttttcactgcgacaacctgcggcttcccttcagtcagcgtcccggttttatcgaacactacagtgtcgagtgtactggcgcgttgcagcgcgtcagcgtcccgcaccagcacgccaaactcagccgcccgcccgacgccggaaataatcgacatcggcgtcgccagccccagcgcacacggacaggcaataatcagtaccgtggtggcaatcaccagggtatagacaatctgcggtgccggaccaaagaaataccagattgccgcactgacaagcgcaataaccaccactaccggcacaaatacggctgagattttatccgccagctgaccgatttctggcttgctgctctgggcctggcgcaccatgcgaatgattcgtgacagcgtagtatggctgccaaccgcactggcacgaaacagcacactgccgtcctgtaccactgtcccggcatggacgctatcgccttcgcctttttgctgcgggattggttcgcccgtcagcatcgcttcatccagccatgcttcgccctgggtaatctcgccatctaccggcacgcgatcgccggtcgtcaggcgcagcaacatacctggctgcacttctgccagaggcacgcttttttcaccttcgtcagtaaccaggcgtgccgtcggcggggttaaatcgagtaacttttccagcgccttagaagaacgctggcgtgcgcgcgcttccagcatatggccgagattgatcagaccgataatcatcgcgctggcttcgtaataaagatgtcgcgcttccatcgggaaccactgcggccacaggttgacgctcatcgaatagagccacgccacgccagtacccagcgccaccagcgtatccatcgtcgccgcaccgttcagcaggcttttccatgcactgcggtaaaaatggccgccggcgaaaaccatcactgccagggttatcaggccgataaccaaccacaggctgcggttgtcagcggtgaccatcatgttatcgccgatcatcccccagaccatcaccgggatacccaccgccagtgcgacaattgcctgccagcggaagcgcttcatcgtagcgacggcggtttcttgctggcgctcgcggcgtttagcgtcatcttcaatcgcttccgcgccgtagcccgctttttccaccgcctgcactaaatcttgtggggaggcactgcccatcaccagcgcagtacgctccgccaggtttacccgtgcctgagtgacgcccggtacgctttgcagcgcattttgtacgcgggtgacacagctggcgcagctcatgccgctcagcagcaactgctggctgtcatcgtcatcggcggtcgctgccggaagcgcctcagaaaccgctgtcagtgcttccgacgggattgatgactccgccagcggtttagcctttgggtggcttacagatgcgtcataacccgcttgtttgatggtttcgatcagctgttctgcactggcagtcccggtaacgtgcgcttcagtgatagacacatccgcctgctcaacatccggacgctgttcaagactttctttcacgcgtttaacgcagtgaccgcaggacaggccgtccagggtcaggtcgatagtttgtgacataaaacactcctttaagacagttttgactggctgtgataaaggttaaaccttccagcaaggggaaggtcaagaaattaataaaccaggcgggtaaaagtccgtaaagattaaaaaatcggctcgatttgcatcaggattagacatttatctctttgttttcctgtagttaagttgcgggtgctaagttaaatcaggatgcctgaaaatcggcaccggggtgaggaattacctcccgcatctataaaaaggagttaacaaaagatgttagatgcaaacaaattacagcaggcagtggatcaggcttacacccaatttcactcacttaacggcggacaaaatgctgattacattccctttctggcgaatgtaccaggtcaactggcggcagtggctatcgtgacctgcgatggcaacgtctatagtgcgggtgacagtgattaccgctttgcactggaatccatctcgaaagtctgtacgttagcccttgcgttagaagatgtcggcccgcaggcggtacaggacaaaattggcgctgacccgaccggattgccctttaactcagttatcgccttagagttgcatggcggcaaaccgctttcgccactggtaaatgctggcgctattgccaccaccagcctgattaacgctgaaaatgttgaacaacgctggcagcgaattttacatatccaacagcaactggctggcgagcaggtagcgctctctgacgaagtcaaccagtcggaacaaacaaccaacttccataaccgggccatagcctggctgctgtactccgccggatatctctattgtgatgcaatggaagcctgtgacgtgtatacccgtcagtgctccacgctcctcaatactattgaactggcaacgcttggcgcgacgctggcggcaggtggtgtgaatccgttgacgcataaacgcgttcttcaggccgacaacgtgccgtacattctggccgaaatgatgatggaagggctgtatggtcgctccggtgactgggcgtatcgtgttggtttaccgggcaaaagcggtgtaggtggcggtattctggcggtcgtccctggagtgatgggaattgccgcgttctcaccaccgctggacgaagatggcaacagtgttcgcggtcaaaaaatggtggcatcggtcgctaagcaactcggctataacgtgtttaagggctgatcatgatgaacacggaaggtaataacggtaacaaacctctcggtctatggaacgtcgtttccatcggcattggggcaatggtgggggcggggatcttcgcgctgctggggcaggctgcattgctaatggaagcctcgacctgggtcgcctttgcttttggcggtattgtggcgatgttttccggttatgcctatgcgcgtctgggggcgagctatcccagcaatggcggcattatcgacttctttcgtcgcggattaggcaacggcgtcttttcgctggcgctctcgttactgtacctgttgacgctggcggtgagcatcgccatggtcgcccgtgcttttggcgcttatgccgtgcagtttttgcatgaaggcagccaggaggagcaccttattttgctctacgcgttggggatcattgcggtgatgacgcttttcaactccttaagcaaccatgcggtagggcggctggaagtgatcctcgtcggcattaaaatgatgatcctgttattgctgattattgccggtgtctggtcgctgcaaccggcgcatatttccgtttctgcgccccccagctccggtgcgttcttctcctgtattgggataactttccttgcctatgcgggctttggcatgatggcgaacgcggcggataaagtgaaagatccgcaggtcattatgccacgggcgtttctggtggcgattggcgttaccacgttgctttatatctcgctggcactggttttgcttagcgatgtatcggcattagagttagaaaaatatgccgataccgccgtagcgcaggctgcttctccgctgctcgggcatgtgggttatgtgatcgtcgtcatcggcgctttactggcgacggcttcagccattaacgcgaacctgttcgccgtgtttaacatcatggacaacatgggcagcgaacgcgaactgccgaagctaatgaataaatccctgtggcggcagagtacctggggcaacattattgtcgtggtgttgattatgctgatgacggcggcactgaatttaggctcactcgccagcgttgccagcgccacctttttgatttgctacctggcggtgtttgtggtggcgatccgcctgcgtcatgatattcacgcctcgttgccgattcttatcgttggtacgttggtgatgttgttggtgatcgttggctttatctacagtctgtggtcccagggtagccgtgcgttgatatggattattggctcactcttactcagccttattgtggcaatggtcatgaagcgcaataaaaccgtataacatctctctgtgcgcagtacttcctgtattattgtggtggcggtcgatattcgcactggcaaaaaaacgtgcttgaatatctgttgaaaccctttaacaaagcacaggaggcgttgcgcgaacgatgaacatcagcgatgtagcaaaaattaccggcctgaccagcaaagccattcgcttctatgaagagaaggggctggtgacgccgccgatgcgcagcgaaaacggttatcgcacctacacgcagcagcatctcaacgaactgaccttactgcgccaggcacggcaggtgggctttaacctggaagagagcggcgagctggtgaatctgtttaacgacccgcagcggcacagcgccgacgtcaaacggcgcacgctggagaaggtggcggagatcgaacgacacattgaggagctgcaatccatgcgcgaccagctgctggcactggcgaatgcctgccctggcgatgacagcgccgactgcccgattatcgaaaatctctccggctgctgtcatcatcgggcagggtgattaagacgagacggctcggatatgtagggttatcccttctatcgcaatgacttcaacatgcgtacctgcaccgagatcctcgctggcgctgacaggccatgaactgtcaccgacgcgcatatgaccgcgcccgttgaccagcggagattccagcacaaaacgtcggccaatcagctgctgcccgcgctggtttaaatgactatcgctgtgcttttgttcgcgcacccgccgcgacaaccatttccaccacagccaggcggcgagcagcgtcaggatggcaaacattaccccttgccactcccaacccagcggcaccagccagaccaccaggccggtaatcaccgctgccacgccgctccacaacaaataaccatttccgcccagcatctcggctgccagcagcaaaccgccgagactgagccagaaaatatgtggatgaacgaccattaactccatcatggctgagtccgtttgttggcgctgtctttcaccagctcggcaatcccggcaatcgaccccatcaggctgctggcctctaatggcatcatcactactttgctgttactggaggaaccgatctgctgtaacgcttcggtgtatttctgcgctacgaagtagttcaccgcctgaatatcaccggaggcgatagcttcagacaccattttggtggcgcgggcttctgcttcggcggaacgttcacgcgcttcagcctgtaaaaacgccgactgacgttcgccttccgctttcaggatttgcgactgtttttcaccttcggctttgaggatttccgcctgacggatcccttccgcttcaagaatgtaagcgcgtttggtacgttccgctttcatctgcgcgttcattgaagagataagctctgccggtgggcgcacgtcgcgaatttcaatacgggtgactttaatcccccacgggttggtggcttcatcgacaatacgcagcaggcgtgagttgatgctgtcgcgctgagagagcatttcgtcaagttccattgaacccagcacggtacggatgttagtcatggtcaggttgatgatcgccagctccagattgctgacttcataagccgcgcgcggcgcgtcaatcacctgaataaagcacacggcgtcgatggtaacgttggcgttatctttcgagataacttcctgggaagggatatcgagcacttgctccatcatattgatcttgcgaccaatgcgatccataaacggcaccaccagactgagccccggctgtaacgttttggtatagcgaccaaagcgttctactgtccactgatagccctgcggtacgattttgacacccgcgccgacaatgaccagcgcgacaaaaatgagaatcgggataaagataagcatcggaaaaacctcctgttgtaccgtccataatcagcaaaattgctgcttgattaaacaaattatacctgattactgaaagagagttcccccttattcctgcgaaggataaactgtttttagtaaaaatcagaaaaagggaacagcgatgcaggaaaatagtcctttgcttcagctacaaaacgtaggatatctggcgggtgatgcgaagattcttaataacatcaatttttcgctgcgtgctggcgaatttaagttaattaccggtccttctggttgtggcaaaagtacgctgctaaaaatagttgcttcattgatcagcccaaccagcggaacgttactgtttgaaggtgaggatgtcagcacactaaagccagaaatctaccgccaacaagtctcttactgcgcccagacaccgacgctgtttggcgatacggtatacgataatctgatctttccctggcagatccgtaaccggcagcctgacccagccatttttctcgattttctcgaacgcttcgccttgccggacagcattttgacgaagaatatcgccgagctatctggtggtgaaaaacaacgcatctcattgattcgtaacctgcaatttatgccgaaggttttattgctggatgaaataaccagtgcgctggatgaaagtaataaacataacgtcaatgagatgatccatcgttatgtgcgcgagcaaaatattgccgtgctgtgggtgacacacgataaagacgaaattaatcatgcggataaagtgattacactgcaaccgcatgccggagaaatgcaggaagcacgctatgaactcgcataatattactaacgaatcattagcactggcattaatgctggtggtggtggcaatcttaattagccataaagaaaaactggcgctggagaaagatattctctggagcgtcgggcgagcgataattcagctgattattgtcggctatgtgctgaagtatattttcagcgtggatgatgccagcctgacattattgatggtgttatttatctgctttaatgcggcgtggaacgcgcaaaaacgcagtaaatatattgctaaagcttttatctcatcgtttattgccattacggtcggggcgggaattaccctggcggtgctgattctctcagggtcgattgaatttatcccgatgcaggtgatccctatcgccgggatgattgccggtaacgccatggtagcggtggggttgtgttacaacaatttagggcaacgggtcattagcgaacagcaacagattcaggagaaactgagtcttggtgcgacgccgaagcaggcttcagcgatattgattcgcgacagtattcgcgcggctttaattccgacggtcgattcagcaaaaacggttggcttagtgagtttaccaggaatgatgtccgggctgatatttgccgggattgatccggtgaaggcgattaaatatcagattatggtgacctttatgctgctctcaaccgccagcttgtcgaccattattgcctgctatttaacctatcgtaagttttataattcgcgccaccagttggtggtgacgcaattgaagaagaaatgatgcgatgccggatgcgcagcatcgcatccggcgttgtggttcatgtgccgatcaacggaatatcaatacaacaatgcatacagctggcggcgatacttcgacgccagtgcatcacccgtacccagcgcagcgaggatctcctggaacgttttacgcgtctgaccgtctgcggcggtgagatctttacgcagatgcccgaacagcaactccagcgcctcttcattgcgcccaacctgatgcagttgcagcgccagttgcgtcgccagtgcggcatcttctggattctccgccacctgctgttgcaactgttgaatttccggcgtatcagccgcctgcttcagcagttcgatttgcgccaccagcccctggtagcgggtgtcctgatcctgcaacggaatggttttcagcaccgcttccgcatcttcagaacggttcagcgcaatcagcgtttctgccagcagcaggccgatctccccgttctgattcgacaactgccaggcgtctttcagcaatggcagggcatcggtgtaattgctttcctgcatcagttgcatcgcctgctgcgctttcagctcttcttcgcgcggcagcactttatccagcagggcgcggatcgcctcttccggttgcggcccctggaagccatctaccggttgcccgttctggaacagatacacggtcggaatcgcacgcagaccaaactgcgcggcaatcatctgctccgcgtcgcagtccagcttcgccagaataaattgcccgttgtactgcgccgcgaggctttccagaattggggttaactgcaaacagtgctggctacgttcagaccaaaaatagaacagcaccggagtggtcatcgactgttcaagaacctgttgcaggttagattcgttaatgttgacaatattttctacggacatggagtcgctctctgttgtcgatattttctttgacatgggggcttaagcgcgcgcttcaactcacccctgcaatattttgtccatcacgcgccccggcagcaggcgcttaagcaccattaccgcccaggtcaccagcgtcaccggatagcgcatcttcggcttctcgctaataaaagcatggcgtactttgtccaccaccgcttccggtcccaacgtaaagcgggcggcgatgccgggattttcgactggtttatcactttgcgtctggttgacgttgtcggtgaagcgagtacgaatgggaccgggttcgatcaggctgactttaattccgctgtggcgcagctccatgcgcagtgcgtctgaccacgcctccagcgcatatttactggccgcgtaagcgccacgacccggcgtggagattaatcccatcaccgatgatgtcatcacaatacgcccttcaccgtgcggtaacatcgcgggtaacaggcgcatggtgagctggtgtgcgccgaaaaagttggcggaaaactgctgttccatctgcgcacggctgatggtggaaagggggccatacatgccgaatccggcattgttaaagatcccatacagacaattatcggtcagggcgatcacctcgtcggctgcgcgatcaacactttctggtgaatccagatcgatcaacacgccggtaaatcccatgctgttcatgcgctcaacatcatccggtttccggcaacctgccagcacatgaaaaccctggcgttttaattcgagcgcgctttccaggccaattccactggaacatccggtaattaagaccgatttttgcataactttacctgtcaggatctccgttgctttatgagtcatgatttactaaaggctgcaactgcttcgccatccagtcggcaataaacggctgggcgtcgcggttgggatgaataccgtcatcctgcatccattgtggcttgaggtagacctcttccataaaaaagggcagcagcggaacatcaaactctttggcgagtttggggtaaatggcgctaaaggcttcattataacggcgaccatagtttgcaggcagacgtatttgcattaacaatggttcagcgttggcggctttgacatcctgcaaaatctggcgcagcgtttgctcggtttgctgtggctgaaaaccacgcaaaccgtcattgccgcccagttcaaccagcacccaacgcggctgatgctgtttcagcagagccggaaggcgcgccagtccttgttgcgaggtgtcgccgctgatgctggcattaactaccgacgttttactctgccacttatcattcaacaaggcaggccaggccgcgctggcagacattcgatacccggcgctcaggctatcacccagaatcaataacgtgtccgctgcggcggcacggaaggttaacaggaccaggaacaggaagggcaaatgccagcggaaaacattgttgaagttcatcatcttaagaagtccgtcggtcagggggagcatgaactctccatcctcaccggagttgagctggttgtcaaacgtggcgagaccatcgcactggtgggcgagtcgggatcgggtaagtcaaccttgctggcgatcctcgccgggcttgatgacggcagcagtggcgaagtgagtctggtgggacaaccgctacataatatggacgaagaagcgcgggcaaagttgcgcgcgaagcacgtcggctttgtttttcagtcatttatgttaattcctacccttaacgcgctggaaaacgtcgagcttccggctctgctgcgcggtgagagtagcgcggaaagtcgtaacggggcgaaagcgttgctcgaacagttagggctgggtaaacgtctggatcatcttccggcacagctttccggcggtgaacagcaacgagtggcgctggcacgagcctttaatggtcgacctgatgtgctgtttgccgacgaacccaccggcaaccttgaccgccagacgggcgataaaattgccgacctgctgttttccctcaaccgtgaacatggcaccacgttgattatggtgacccacgacctgcaactggcggcacgctgcgaccgctgcttacggctggtgaacgggcagttgcaggaggaagcatgattgcacgttggttctggcgcgaatggcgttcgccgtcgctattaattgtctggctggcgctaagcctggcggtggcctgcgtgctggcgctgggcaatatcagcgatcgcatggagaagggcttaagccagcaaagccgtgagtttatggcgggcgatcgggcgttgcgcagttcacgcgaagtgccgcaagcgtggctggaggaagcgcaaaagcgcggcctgaaagtcggcaagcagctgactttcgccacaatgacctttgcaggcgacacaccgcagctggcgaacgtcaaagcggtggatgatatctacccgatgtatggcgatctgcaaactaatccccctggcctgaaaccgcaggcgggcagcgtattgctggccccacgcctgatggcactgcttaacctgaaaacgggcgacaccattgacgtgggcgatgccaccttgcggattgccggagaagtgattcaggaaccggattccggttttaaccccttccagatggctccgcgtctgatgatgaatctggcggatgtcgataaaaccggagccgtgcagccggggagtcgggtcacctggcgttataaattcggcggcaacgagaaccagctcgacggctatgagaaatggttgttacctcagcttaaacccgaacaacgctggtacggtctggaacaggacgaaggcgcgctggggcgatcgatggaacgctcgcaacagttcctgctgctttcggcgcttctgaccttgctgctggcagtggcagcggtggcggtagcgatgaatcattactgtcgcagtcgctacgatctggtggcgatcctcaaaacgctgggggcagggcgagcgcaactgcgtaagctaatcgtcggtcagtggttgatggtgctgacgctttcagccgttaccggtggggccataggcctgttgttcgaaaacgtgttgatggtgctgctcaagcccgttctgcctgctgcactaccgccagccagcctctggccgtggctgtgggcgcttggcaccatgacggtcatctcgctgctggtggggctacgaccatatcgcttgttgctggcaacgcagcctttacgcgtattacgtaatgatgtggtagcgaacgtctggccgctgaagttttatctgccgattgtcagtgtggtggttgtgctgctgctcgccggattaatgggtggcagcatgctgctttgggcggtgctggcgggcgcggtagtactggctttgctgtgcggtgtgctgggctggatgctgctgaatgtacttcgccgcatgacgctgaaatcgctgcctctgcgcctggcggttagccgcctgttacgtcagccgtggtcaacgttaagtcagctttcggcattttcgctctcctttatgctgctggcactgctgctggtgttgcgtggcgatctgctcgaccgctggcagcagcagctacctccagaaagcccgaactactttttaattaacatcgccacagaacaggtagcaccgctaaaagcgttcctcgcggaacatcagatagtcccggaatcgttttatccggtggtgcgggcgcggctgacggcgattaacgataagccgacagaaggtaatgaagatgaggcgcttaaccgcgaactcaatcttacctggcaaaatacgcggcccgatcataatccgattgtcgccggtaactggccgccaaaagccgatgaagtgtcgatggaagaggggctggcgaaacgcttaaacgttgccctcggtgataccgtgacttttatgggcgatacccaggagttccgcgctaaagtgaccagcctgcgcaaagtggactgggaaagtctgcggcctaatttctattttattttccctgaaggggcattagacgggcaaccgcagagctggcttaccagtttccgctgggagaatggcaacggcatgttgacacaactcaaccgccagttcccgaccattagcctgttagatattggcgcgattttaaaacaggtcggtcaggtgctggagcaggtaagtcgggcgctggaagtgatggtggtactggtcaccgcctgcggtatgttgctgttgctggcacaggtgcaggtgggaatgcgtcagcgtcatcaggagctggtggtgtggcgcacactcggtgcggggaaaaaactgctgcgtaccacgttgtggtgtgagttcgccatgcttgggtttgtttccggcctggtggccgcaattggtgcggaaacggcgctggcagtgttgcaggcgaaagtgtttgattttccgtgggagccagactggcgattgtggattgttctgccgtgcagcggagcgctgctgctgtcgcttttcggcggctggctgggtgcgcgactggttaagggtaaggcgctgttcaggcagtttgcggggtgatgagagtaaataaggggcgttctggttgaatggaacgccttgtttaaattaattctacaatatgtttcattgatgatgttattgaattggtgatttcctatctttctattgctgatattaatctgaatcggtggagtttattgattttaaatatagccctacaaaaataactcagactaataaaatcataaatcatatgcgttgaatggatattatccatatagtgaatttgttgatgatgaattcatctgtgctaaaaatgttagtttaataaaatattgaaagtgacctgtaataacagttgttgttgattgagaacaaataagtttatgtgaaaaatatataaatacattagctggtcttgtgtgtcattttatttttttttgttgctaacacagggatatgaacaataactaaaagggcactttatatgagcggaaaaccagcggcgcgtcagggagatatgactcagtatggcggtcccattgtccagggttcggcaggtgtaagaattggcgcgcccaccggcgtggcgtgctcggtgtgtccgggcgggatgacttcgggcaacccggtaaatccgctgctgggggcgaaggtgctgcccggcgagacggaccttgcgctgcccggcccgctgccgttcattctctcccgcacctacagcagctaccggacgaagacgcctgcaccggtgggcgttttcggccccggctggaaagcgccttctgatatccgcttacagctacgtgatgacggactgatactcaacgacaacggcgggcggagcattcactttgagccgctgctgccgggggaggcggtgtacagccgcagtgagtcaatgtggctggtgcgcggtggtaaggcagcacagccggacggccatacgctggcgcggctgtggggggcgctgccgccggatatccggttaagcccgcatctttacctggcgaccaacagcgcacaggggccgtggtggatactggggtggtctgagcgggtgccgggtgctgaggacgtactgccagcgccgctgccgccgtaccgggtgcttaccgggatggcggaccgcttcgggcggacgctgacgtaccggcgtgaggccgccggtgacctggccggggaaatcaccggcgtgacggacggtgccgggcgggagttccgtctggtgctgaccacgcaggcgcagcgtgcggaagaggcccgcacctcttcgctatcttcttctgacagttcccgccctctctcagcctcagcgttccccgacacactgcccggtaccgaatacggccccgacaggggtatccgcctttcggcggtgtggctgatgcacgacccggcatacccggagagcctgcccgctgcgccactggtgcggtacacgtatacggaagccggtgaactgctggcggtatatgaccgcagcaatacgcaggtgcgcgctttcacgtatgacgcgcagcacccgggccggatggtggcgcaccgttacgcgggaaggccggagatgcgctaccgctacgacgatacggggcgggtggtggagcaactgaacccggcagggttaagctaccgctatctttatgagcaggaccgcatcaccgtcaccgacagcctgaaccggcgtgaggtgctgcatacagaaggcggggccgggctgaaacgggtggtgaaaaaagaactggcggacggcagcgtcacgcgcagcgggtatgacgcggcaggaaggctcacggcgcagacggacgcggcgggacggaggacagagtacggtctgaatgtggtgtccggcgatatcacggacatcaccacaccggacgggcgggagacgaaattttactataacgacgggaaccagctgacggcggtggtgtccccggacgggctggagagccgccgggaatatgatgaaccgggcaggctggtatcggagacatcgcgcagcggggagacagtacgctaccgctacgatgacgcgcacagtgagttaccggcgacgacaacggatgcgacgggcagcacccggcagatgacctggagccgctacgggcagttgctggcgttcaccgactgctcgggctaccagacccgttatgaatacgaccgcttcggccagatgacggcggtccaccgcgaggaaggcatcagcctttaccgccgctatgacaaccgtggccggttaacctcggtgaaagacgcacagggccgtgaaacgcggtatgaatacaacgccgcaggcgacctgactgccgttatcaccccggacggcaaccggagcgagacacagtacgatgcgtggggaaaggcggtcagcaccacgcagggcgggctgacgcgcagtatggagtacgatgctgccggacgtgtcatcagcctgaccaacgagaacggcagccacagcgtcttcagttacgatgcgctggaccggctggtacagcagggcggctttgacgggcggacgcaacgttatcattatgacctgaccggaaaactcacacagagtgaggatgagggacttgtcatcctctggtactacgatgaatcggaccgtatcactcaccgcacggtgaacggcgaaccggcagagcagtggcagtatgatggccacggctggctgacagacatcagccacctgagcgaaggccaccgtgttgccgtccactatggctatgacgataaaggccgcctgaccggcgaatgccagacggtggagaacccggagacgggggaactgctgtggcagcatgagacgaaacacgcatacaacgagcaggggctggcaaaccgcgtcacgccggacagcctgccgccggtggagtggctgacgtatggcagcggttacctggcgggaatgaagctgggcgggacgccgctggtcgagtatacgcgggacaggctgcaccgtgagacggtgcgcagcttcggcagcatggcaggcagtaatgccgcatacgaactgaccagcacatacacccccgcaggccagttacagagccagcacctgaacagcctggtatatgaccgtgactacgggtggagtgacaacggcgacctggtgcgcatcagcggcccgcgacagacgcgggaatacggctacagcgccacgggcaggctggagagtgtgcgcaccctcgcaccagacctggacatccgcatcccgtatgccacggacccggcgggcaaccggctgccggacccggagctgcacccggacagtacactcacagtgtggccggataaccgcatcgcggaggatgcgcactatgtctaccgccacgatgaatacggcaggctgacggagaagacggaccgcatcccggcgggtgtgatacggacggacgacgagcggacccaccactaccactacgacagccagcaccgcctggtgttctacacgcggatacagcatggcgagccactggtcgagagccgctacctctacgacccgctgggacggcgaatggcaaaacgggtctggcggcgggagcgtgacctgacggggtggatgtcgctgtcgcgtaaaccggaggtgacgtggtatggctgggacggagacaggctgacgacggtgcagactgacaccacacgtatccagacggtatacgagccgggaagcttcacgccgctcatccgggtcgagacagagaacggcgagcgggaaaaagcgcagcggcgcagcctggcagagacgctccagcaggaagggagtgagaacggccacggcgtggtgttcccggctgaactggtgcggctgctggacaggctggaggaagaaatccgggcagaccgcgtgagcagtgaaagccgggcgtggcttgcgcagtgcgggctgacggtggagcaactggccagacaggtggagccggaatacacaccggcgcgaaaagctcatctttatcactgcgaccaccggggactgccgctggcgcttatcagcgaagacggcaatacggcgtggagcgcggaatatgatgaatggggcaaccagcttaatgaggagaacccgcatcatgtgtatcagccgtaccgtctgccagggcagcagcatgatgaggaatcagggctgtactataaccgtcaccggtactacgatccgttgcaggggcggtatattactcaggacccgatggggttgaaagggggatggaatttatatcagtatcctttaaatccactacaacaaattgaccctatgggattattgcagacttgggatgatgccagatctggagcatgtacggggggagtttgtggtgttctttcacgtataataggaccaagtaaatttgatagtactgcagatgctgcgttagatgctttgaaagaaacgcagaatagatctctatgtaatgatatggaatactctggtattgtctgtaaagatactaatggaaaatattttgcatctaaggcagaaactgataatttaagaaaggagtcatatcctctgaaaagaaaatgtcccacaggtacagatagagttgctgcttatcatactcacggtgcagatagtcatggcgattatgttgatgaatttttttcaagtagcgataaaaatcttgtaagaagtaaagataataatcttgaagcattttatctcgcaacacctgatggacgatttgaggcgcttaataataaaggagaatatatttttatcagaaatagtgtcccgggattgagttcagtatgcataccgtatcatgattaattttagtgcttttattagtggggcctataaggagattcaatgaaatatagttcaatattttcgatgctttcattttttatactatttgcctgtaatgagacagctgtttacggttctgatgaaaacattatttttatgaggtatgtggaaaaattacatttagataaatactctgttaaaaatacggtaaaaactgaaacaatggcgatacaattagctgaaatatatgttaggtatcgctatggcgaacggattgcagaagaagaaaaaccatatttaattacggaactaccagatagttgggttgttgagggagcaaagttaccttatgaagttgcgggtggtgtatttattatagaaattaataagaaaaatggatgtgttttgaatttcctacatagtaaataatgctggcgctgatggatgcggatggaaacattgcgtggagcggggagtatgatgagtggggcaaccagctgaatgaagagaacccgcatcacctgcaccagccgtaccggctgccggggcagcagtatgataaggagtcggggctgtactacaaccggaaccggtactacgatccgttgcaggggcggtatatcactcaggacccgatagggctggaggggggatggagtctgtatgcgtatccgctgaatccggtgaatggtattgatccattagggttaagtcccgcagatgtagcgctaataagaagaaaagatcaactaaaccatcaaagagcatgggatatattatctgatacttatgaagatatgaagagattaaatttaggtgggactgatcaatttttccattgtatggcattttgtcgagtgtctaaattaaatgacgctggtgttagccgatcggcgaaagggctgggttatgaaaaagagattagagattacgggttaaatctgttcggtatgtacggcagaaaagtaaagctatcccattctgaaatgattgaagataataaaaaagacttggctgtaaatgaccatgggttgacatgtccatcaacaacagattgctcagatagatgtagtgattatattaatccagagcataaaaaaacgataaaggctttacaagatgctggctatctcaagtaatctatcaaagatgataatatttatttttgctattataatcattgttgttttatgcgtaattacttatctttatttatacaaagatgaatctcttgtaagtaaacattacataaactatatggcaataccagaaaatgatggagtttttacatggctcccagatttttttccgcacgtagcggtggatatatcaatatacacaaatgtagaagatgattatttttttcttatttttccctaacaaatgatgatgggggtaggtttaagaaaacattgacagtgagggccagggaacaagtggcgaaaatcgtatcaaagaatgatccagatacaaaaaaagtgtggtgtaaatatggtaagataccagggcaaggggatggtgtaaacctttttttgttggtgaaattaatgttacgcattattttataacaaatattggagctggattgcctgatgcttgtgcagagtaattgcttgaattaagagtctatcccatatcgaagtcgtcaacttcgtagtgaggaaaagtaaaattcctgactgagaaaagacatgtcggctattgtgtaaagccatatagctcagacgatgaatatctactcgtattcagttgtttattgagggtgagttccgaccctgaaacaacaaataaaatgaacagtcagagagtttacatagaattgcactggtcttttacgatatctgacattgtgtaatacatattcagccatgcattaattaaaatgttacgtgtttaatgtgagtccctatctgaaaataaataatccttccggattaaaataaattcttgccgggaaagaaagaggaaataaaccattagcggaaaaccagcggcacgccagggtgacatgccccagtacggcggcccgatagtccagggttcagcgggggtactgatagtcgcgccgactgcatcgagaactccatacaactttttacggaacgtcacctgataaaatttgttcagtatcgtcttttgagattctcaaggttatggagtaaccagacagaacggacaccactgtcggagataaaaaccccctgtttacgcagctcgttgctggcccggtgctgaccatgtgtcgggaaagcgacggcgtaatcaacaacagcctgttcagttgcctcatcggtacggttcttaaggttaggagcgcggcgactacgattaatctgcgcatccacaccgccttcagcgaccagttcgcggtaacgataaaacgtatcacgcgaaacgcccatgattttacaggcttttgatacgttgctgagttcttcagccagattgagcaaaccggctttgtgtttgatgacgggattggcagtatgaagcatgagagttacctcttgttttggataaggattcgacactcatatcaaaaccggtaactctcaacctttcaaggccatgtgtcagatcaagtcgcgactaatacaaatacgtccctcattaccgcgccttaacccattccgccacttccgcccactcaccgcgaaagacaactttttccgcttttttctcaagctgatagcgatacatcgggtcgtaatattcttcaagtaacggcaccagccaggccagatgaccgtcggtgctgccggtggtgagttgcgttgtcagtgctgcatccagccttgcagccagttcgttatagcgctgtagccccagccgacgcttaatcgccgaaagtccgtgatgcaggtattcgcaatactcctgccagccctgttcgtcgccgtacgcgtgggtaaaatcatgatgcatacgcaagaaatactcttcgttcaggcgctcaagacggatctcaaacggatcttctaccaccgcaatcgccgcctgagtcattcgctcgcgcaggcattccggcaggtgattcgaaccgatcatccggctttcgtcttccagcacccacaggcgcaaattctgacgggcgtcggtttttagcatttcggcagccagcaggttttcaaaactcgcctggctaagttgtggttgtaacgtgcgaccaaacgccgaaccgcgatgacgcgccaacccttccagatcaacaccgttcggctgttgctgcactaacagcgttttaccgctgccggtacaaccgccaatcagcactatcggtttttgtgccagttcaatagtcgcctgaatcgcggtctggcgcagtgccttataaccgccttccaccagcggataatcaatccccgctgcatgcaaccagctttgcacaatatgtgagcgctgaccgccacgggcgcagcagagaataccttgcggattttgcaggcacgctgcccgccaggcgtccatgcgctgctgacgaatttcacccgccaccagtttatgtcccagcgccagcgctgcgtctgagccttgctgtttatagcaggtgccaacggcggcgcgttcatcgttattcattaacggcagattgatagcggcgggcattgcgccgtgctcaaactcgataggggcgcgaacatcaataatgggcgtatcagcaatcagcagggcacgatagtcctgttccgtgtgtctctcttgcatagttaaaagtgaacctcaaatcagcttgcgcgctattttacgcgccaacgcgcaaggaaacttgatttttaactgcgtgggttgccgaaaatttctaaaaatccgctgatttccggcctgcgctgggtaaacaaggtcacaatatcttctaccgctttgccgctgccaaatttgcgccatgccagactcaatggcgaaggagggcgcatcgttgggattacccggctgaccagttgttgattatcgatcattgactggcaaagcgattttggcaaaaaaccaatgccaacgcccgccagatgggcggcgattttcgtttccatatcgggaacaataatctctttttgccctggcaatcgccaggcgacgcgtttggttaaggtgcgggcgctgtcttcaatattgaccgccggaaagcgccgcaactgcgcttctgttagcggctcttcaacgttcgccagcggatgatccgccgccatgacaaagcgccattgcaccgatcctaagggatcaagactaaaggtatttgccagcgcctcagttcccgtgacgccgatagccagcgaaaaaccttcgtacaatagcgagtcccagacgcccatatagatttgtcgggagatgtgaaactgggtaaaggggtaacgctcattcagccacgccagcaactgggcgacggcctgggggttgtagagcaggttgttgatgacaatattcacctggcgttccacgccatcattcacctgttgcagctcgcttggcatactttccagccagctcagccagtctctggcctgggaaagtagatgctcgccagccgctgtcaacgtcacgctgcgagtcgtacggaaaaacagcgctactccggtattctcttccagaagtttaatgcgataactgatcgtcgccgtggttttacataatcgttctgccgcttttgaaaaacttcctgtttcagcaaccgcaatgaaagtccgcaaggtttctggatcgaacatcttcaggtatccccttttaaatccgcaagttgcgtgattttcttatcctctgatttatcagtatttttacatgataaccctgttcaatttgtggactaaatctagttttggaaaaatattccaacttttgtattgatgttgttctcttaaggttttagattgcctgttattgaaaccaagctgaccggtcggcggtggttgaacggaattatgttacaaggacaaaaagatgaaacttcaggtattaccgttaagtcaggaagcctttagtgcttatggcgacgtaatcgaaacgcagcaacgggattttttccatattaacaatggcctggtggagcgttaccacgatttggcgctggttgagattcttgagcaagaccgtacgcttatcagcattaaccgcgcgcaaccggcgaatctgccgctgaccattcacgaactcgaacgtcatccgctgggtactcaggcctttatcccgatgaaaggtgaggtgtttgtggtggtcgtggcgttaggtgacgacaaaccagacctgtcaacgctgcgggcgtttatcaccaacggcgaacagggagtgaattaccatcgtaacgtctggcatcacccacttttcgcctggcagcgcgtcaccgattttctgaccatcgatcgcggcggcagtgacaactgtgatgttgaaagtattcctgaacaggaactctgttttgcgtgacgcctgcaaccgacttgcataagataaactaattgttcattgtttatgctcacttgtaggtcggagttaacgtaggtatgacggaagttagacggcgcggcaggccaggacaggcggagcctgtggcacagaagggcgcacaggcgttagagcggggaattgcgattctgcaatatttggaaaaaagtgggggaagttcgtcggttagcgatatttctctcaatctggatttgccgctctccacgacctttcgcttgctgaaggttttacaggcagcggattttgtctatcaggacagtcaattaggctggtggcatataggattaggtgtctttaacgtcggtgcggcgtacatccataaccgcgatgtcctctccgtcgccgggccgtttatgcgccgcctgatgttactttccggcgaaacggtcaatgtcgcgatccgtaacggcaatgaagcggtattaattggtcagttagagtgtaaatcgatggtcaggatgtgtgcgccactgggcagtcgtctgccactgcatgcttccggtgcgggcaaagcgctgctttatccgctggcggaagaggagttgatgagcatcattctgcaaaccggtttgcagcagtttacgccaactacgcttgtggatatgcccaccttgctgaaggacctggaacaagcgcgtgaactgggctataccgtagataaagaagagcatgttgtaggtctgaattgcatagcttcagcaatttacgatgatgtcggtagtgttgttgccgctatctccatctccgggccttcatcaagactgacagaagatcgttttgtcagtcagggtgagctggtcagagacaccgcccgcgatatcagcacggcgttgggactgaaagcacatccataatgtctgtcgcatcccgctctgcggagcgggtttttttgacaaaatttgaaagttggaaaaattttccaataaatagaggtaggaataaaatggcaaaaatgagagccgttgacgcggcaatgtatgtgctggagaaagaaggtatcactaccgccttcggtgttccgggagctgcaatcaatccgttctactcagcgatgcgtaagcacggcggtattcgtcacattctggcgcgtcatgtggaaggtgcttcgcacatggcggaaggttatacccgcgcaacggcagggaatatcggcgtatgtctggggacttccggtcctgcgggcacggacatgatcaccgcgctctattccgcttctgctgattccattcctattctgtgcattaccggccaggcaccgcgcgcccgtctgcataaagaagattttcaggccgtagatattgaagcaattgctaaaccggtcagcaaaatggcggttacagttcgtgaagcggcgctggtgcctcgcgtgctgcaacaggcatttcacctgatgcgttctggtcgtccgggtccggtactggtggatttaccgttcgacgttcaggttgcggaaatcgagtttgatcctgacatgtacgaaccgctgccggtctacaaacctgctgccagccgtatgcagatcgaaaaagctgtagaaatgttaatccaggccgaacgtccggtgattgttgccgggggcggggtaattaatgctgacgcagctgcactgttacaacagtttgctgaactgaccagcgttccggtgatcccaacgctaatgggctggggctgtatcccggacgatcatgaactgatggccgggatggtgggtctgcaaaccgcgcatcgttacggtaacgcaacgctgctggcgtctgacatggtgtttggtatcggtaaccgttttgctaaccgtcataccggctcggtagagaaatacaccgaagggcgcaaaatcgttcatattgatattgagccgacgcaaattggtcgcgtgctgtgtccggatctcggtattgtctctgatgctaaagcggcgctgacactgctggttgaagtggcgcaggagatgcaaaaagcgggtcgtctgccgtgtcgtaaagaatgggtcgccgactgccagcagcgtaaacgcactttgctgcgcaaaacccacttcgacaacgtgccggtgaaaccgcagcgcgtgtatgaagagatgaacaaagcctttggtcgcgatgtttgttatgtcaccaccattggtctgtcacaaatcgctgcggcacaaatgctgcatgtctttaaagaccgccactggatcaactgtggtcaggctggtccgttaggctggacgattccggctgcgctaggggtttgtgccgctgatccgaaacgcaatgtggtggcgatttctggcgactttgacttccagttcctgattgaagagttagctgttggcgcgcagttcaacattccgtacatccatgtgctggtcaacaacgcttatctggggctgattcgtcagtcacaacgcgcttttgacatggactactgcgtgcaactcgctttcgagaatatcaactccagtgaagtgaatggctacggtgttgaccacgtaaaagtagcggaaggtttaggttgtaaagctattcgggtcttcaaaccggaagatattgcgccagcctttgaacaggcgaaagccttaatggcgcaatatcgggtaccggtagtcgtggaagttattctcgagcgtgtgaccaatatttcgatgggcagcgaactggataacgtcatggaatttgaagatatcgccgataacgcagcggacgcaccgactgaaacctgcttcatgcactatgaataagggagataaataatgttacgtttctctgctaatttatcgatgttatttggagaatatgattttctcgcccgttttgagaaagctgcgcagtgtggttttcgcggcgttgaatttatgtttccttatgactacgacattgaagaattaaaacatgtgctggcgagtaataaactcgaacatacgctgcacaatttaccggcgggtgactgggcggcgggggagcgcggtattgcctgtattcctggccgtgaagaagagtttcgggatggcgtagcagcagcgattcgttatgcccgtgcgctgggtaataaaaaaattaactgtctggtcggtaaaacgccggctggtttcagcagtgaacagattcacgcaacgcttgtagaaaacctgcgttatgccgcgaatatgctgatgaaagaagatattttattactgattgaacctattaaccattttgatattcctggtttccatctcaccggaactcggcaggcgctgaaattgattgatgatgttggttgctgcaatttgaaaattcagtatgacatttatcatatgcagcggatggaaggtgaattaaccaacaccatgactcagtgggctgataaaattggtcacctgcaaattgccgataatccgcatcgcggcgaaccgggaaccggagaaattaattatgattatctctttaaggtaatcgaaaattctgactacaacggttgggttgggtgtgaatataaaccccaaaccaccacggaagccggtttacgctggatggatccgtaccgttaaaacgtaacgctattcagacaatgcttttttaggccgctaagttggcaggggatcgtgttgtctgaattcaggaaaagcgaaatttaaaagaggttaattatgaaactgggatttattggcttaggcattatgggtacaccgatggccattaatctggcgcgtgccggtcatcaattacatgtcacgaccattggaccggttgctgatgaattactgtcactgggtgccgtcagtgttgaaactgctcgccaggtaacggaagcatcggacatcatttttattatggtgccggacacacctcaggttgaagaagttctgttcggtgaaaatggttgtaccaaagcctcgctgaagggcaaaaccattgttgatatgagctccatttccccgattgaaactaagcgtttcgctcgtcaggtgaatgaactgggcggcgattatctcgatgcgccagtctccggcggtgaaatcggtgcgcgtgaagggacgttgtcgattatggttggcggtgatgaagcggtatttgaacgtgttaaaccgctgtttgaactgctcggtaaaaatatcaccctcgtgggcggtaacggcgatggtcaaacctgcaaagtggcaaatcagattatcgtggcgctcaatattgaagcggtttctgaagccctgctatttgcttcaaaagccggtgcggacccggtacgtgtgcgccaggcgctgatgggcggctttgcttcctcacgtattctggaagttcatggcgagcgtatgattaaacgcacctttaatccgggcttcaaaatcgctctgcaccagaaagatctcaacctggcactgcaaagtgcgaaagcacttgcgctgaacctgccaaacactgcgacctgccaggagttatttaatacctgtgcggcaaacggtggcagccagttggatcactctgcgttagtgcaggcgctggaattaatggctaaccataaactggcctgatacccgcaataaaaatggccgatatcagaaaatgaatcggccagcaatattaaaaaagaaagcagccaaagatgttgcttcagtattaaaaataatatttttattttatttgttcctcatagctagattaaaacaacgttattcgatacgtgaaattaagagggatttatggaacatcagagaaaactattccagcaacgcggctatagcgaagatctattgccgaaaacgcaaagccagcggacctggaaaacatttaactattttaccttatggatgggttcggttcataacgttcccaattatgtgatggtcggcggcttttttattctcggcttgtctacctttagtattatgctggcaattatcctcagcgcctttttcattgccgcggtaatggtattaaacggtgctgcgggcagtaaatacggtgtgccttttgccatgatcctgcgtgcttcttacggtgtacgtggtgcactgtttcccggattattaaggggcggaattgccgccatcatgtggtttggtttgcaatgttacgcggggtcactggcctgcttgattctgattggcaaaatctggccgggatttttaactctcggtggtgatttcactctgttaggcctttctctaccgggcttaattactttcttaatcttctggctggtcaacgttggtataggttttggcggtggcaaagttttaaataaattcactgccattcttaacccgtgcatctatatcgttttcggcggtatggcgatttgggcgatttcactggtcgggatcggtccaatctttgactacattccgagcggtattcagaaagcagaaaacggtggcttcctgttcctggtggtgattaacgcggtagttgcggtctgggcggcaccggcggtgagcgcatccgactttacgcaaaacgcccactcgtttcgtgagcaggcgctggggcaaacgctgggtttagttgtggcctatattctgtttgcggtcgccggggtatgtattattgccggagccagtattcactacggcgctgatacctggaacgtgctggatattgttcagcgttgggacagcctgttcgcctcgttctttgcggtactggttattctgatgacaactatctccactaacgcgaccggtaatattattccagccggttatcagattgccgccattgcaccgacaaaactgacctataaaaacggcgtactgattgccagtattatcagcttgctgatctgcccgtggaaattaatggaaaatcaggacagcatttatcttttcctcgatattatcggcggaatgcttggtccggtaattggtgtcatgatggcgcattattttgtggtgatgcgcggacaaattaatcttgatgaactgtataccgcacctggcgattataaatattacgataacggttttaacctcactgcgttttcagtaactctggtggccgttattttatctcttggcggtaagtttattcactttatggaaccgttatcgcgtgtttcatggtttgtcggcgtcatcgtcgcctttgcggcctacgccttattaaagaaacgtacaacagcagaaaaaacaggagagcaaaaaaccataggttaattaatcccgatattgaacattgagttaaaaaccaatctgtattttacaaggagtttgttatgtcttttgatttaatcattaaaaacggcaccgttattttagaaaacgaagctcgcgttgtagatatcgccgttaaaggcggaaaaattgctgctatcggtcaggatctgggcgatgcaaaagaagttatggatgcgtctggtctggtggtttcgccgggcatggttgatgcgcacacccatatttctgaaccgggtcgtagccactgggaaggttatgaaaccggtactcgcgcagcggcaaaaggtggtatcaccaccatgatcgaaatgccgctcaaccagctgcctgcaacggttgaccgcgcttcaattgaactgaagttcgatgccgctaaaggcaagctgactattgatgcggcacaactcggtggcctggtgtcttacaacatcgaccgtctgcatgagctggatgaagtgggcgttgtcggcttcaaatgcttcgttgcgacctgtggcgatcgcggtatcgacaacgacttccgtgatgtaaacgactggcagttcttcaaaggtgcgcagaagctgggcgaactgggtcagccggtgctggtgcactgcgaaaacgcgctgatttgtgacgaactgggcgaagaagcgaagcgtgaaggtcgcgtaaccgctcatgactatgtggcttcgcgtccggtatttaccgaagtggaagcaattcgccgcgtactgtatctggcgaaagttgctggttgccgtctgcacgtttgccacgtcagcagcccggaaggtgttgaggaagtgactcgtgcacgtcaggaaggtcaggacgttacttgtgaatcctgcccgcattactttgtactggataccgatcagttcgaagaaatcggtactctggcgaagtgttcaccgccgatccgcgatctggaaaaccagaaaggcatgtgggaaaaactgtttaacggtgaaatcgactgcctggtttccgaccactctccatgcccgccggaaatgaaagccggtaacatcatgaaagcatggggcggtatcgccggtctgcaaagctgcatggacgtgatgttcgatgaagcggtacagaaacgcggtatgtctctgccaatgttcggcaaattaatggcgactaacgcagcagatattttcggtctgcagcaaaaaggccgtatcgccccaggaaaagatgccgacttcgtcttcattcagccgaatagcagctatgttcttaccaatgacgatctggaatatcgccacaaagtcagcccgtatgttggccgtaccattggcgcgcgtatcacgaaaaccatcttacgtggtgatgtgatttacgacattgaacagggcttccctgttgcgccgaaaggtcaatttatccttaaacatcagcagtaatctggcccctgcaatgcccgtccttgcggcgggcattctccggttaaggtgtgtttatgttcaattttgcagtcagccgcgaaagcctgttatcaggatttcagtggtttttctttattttttgcaacacggttgtggttcctcctacgctactttctgcttttcagttgccgcaaagtagcctgcttacgctcacgcaatatgcttttcttgctaccgcactggcctgcttcgctcaggcgttttgcggtcatcgtcgcgctattatggaagggccaggtggcctgtggtggggaaccatccttactatcacccttggtgaagcatcgcgcgggacaccgatcaacgatatcgccaccagcctggcagtggggattgcactctccggcgtgctgacgatgttgattggttttagcggattaggccatcgcctggcacggttatttacgccgtcggtgatggtcttgtttatgttgatgctgggcgcgcagctgaccactatctttttcaaaggtatgctcgggctgccgtttggcatagccgacccgaattttaaaattcagttaccgccgttcgcgctctcggtggcggtgatgtgcctggtactggcgatgattatcttcctgccgcaacgttttgcccgttatggcctgctggtcggcaccataaccggctggttgttgtggtacttttgctttccttcttcgcactcgctctccggtgagttgcactggcagtggttcccgctcggcagtggcggtgctttgtcgccgggaattattctgacggcggtgattacaggtctggtaaatatcagcaatacctacggtgcgattcggggcacggatgttttttatccgcagcagggcgcagggaatacgcgttatcgtcgtagctttgtggcgaccggatttatgacgctgataaccgtaccgctggcggtaattccattttcaccgtttgtttcatccattggtttattaacccagactggcgattacacgcggcgttcgtttatttatggcagcgttatttgcctgctggtggcgctggttcctgcactcacgcgactgttttgcagtatccctttacccgtgagtagtgcggtcatgctggtttcttatctgcctttactcttttccgcgctggtgtttagccagcaaataacgtttaccgctcgcaatatttatcgactcgcattgccgttatttgtcggcatatttttaatggcattaccgcctgtgtatctgcaagaccttccattaacgcttcgtcctctgctcagtaacggcttattggtcgggattttactggctgttcttatggataaccttattccgtgggaacgcatcgaataatttgttgaaaaaggattgataatgaagattgtcattgcgccagactcttttaaagagagcttaagtgcagaaaaatgttgtcaggcaattaaagccgggttttcgaccctctttcccgatgcgaactatatctgtttgccgatagcggatggcggcgaagggacggtggatgcgatggtcgccgcgacgggcggcaacatcgtgacgcttgaagtctgcgggccgatgggcgaaaaagtgaatgctttttatggccttaccggcgacgggaaaacggcggtgattgagatggcggcagcaagtggcctgatgctggtcgcgcctgaaaagcgtaatccgttgctggcctccagttttggtacgggggagttaattcgtcatgcgctggataacgacattcgccatattattctcggcattggcggcagtgcgacggtcgacggcggtatgggcatggcgcaggcgctcggtgtgcgtttccttgatgccgacggtcaggcgctggcggcaaacggtggtaatttagcgcgcgtggcaagcattgagatggatgaatgcgatccgcgtctggcgaattgccatattgaagtagcatgtgacgttgataacccgctggtaggggcacgcggcgcggcggcggtgtttggcccgcaaaaaggggcaacgccggagatggtcgaagaacttgaacaggggctgcaaaattacgcccgtgttttacaacagcaaactgaaattaatgtctgccagatggcgggcggcggcgctgcgggcggtatgggtattgcggcggcggtatttctcaatgcggatattaaaccgggcattgaaattgtgttgaatgcggtcaatcttgcgcaggcagtgcagggcgcagcactggtgattaccggggaagggcgcatcgactcgcaaacggcaggcggtaaagcgccgctgggtgtggcgtcggtggcgaagcagtttaatgtaccggtgattgggattgctggcgtattgggtgatggcgtggaagtggtgcaccagtacggcattgacgcggtattcagcattttgcctcgtctggcacctttagccgaagtgctcgccagcggtgaaaccaatctcttcaacagcgcgcgaaatattgcctgcgccattaaaataggtcagggaattaaaaactaacccttacctttaaagcggatgcgatttatatcgcataagagtgcagtactcatgccggatgcggcatgagtaccatatccttcctgaaaatcgcgcaaattctatatattgcagagatcatgtaggcctgataagcgaagcgcatcaggcaatgttacaaaaaaagccacggtataaaccgtggcaaaatccaacatagctaaaaataatcaggcgagtggtatgacttaaatctctacgtcgcggttacaatctttcgagtaaatatagctgaacgcttcaccacgccctacaccataaccagcctgtaaagaataagcgcccataaagatgtaatcgccttttttcaccgggatccagttattgtcgaggttataaaccccctgaccggaaagaatataggcaccgtgttcctgaacgtgtgtttcgatataaccgtggctggcacctggtgcaaaagagaggatatgcatgttcatatcaaaacctaactctttgggcagaaaatccagcagaataacatcgtccatgccttcataatgaatgcgttccagttcgctggcattgccagaaaccagccacggtgcatagccttctaccggaacatagcggcgcttatataaaaagatttggctgtcttcggcctgggcgttaacaaacgtcattcaggagcctggcgggcaataaagatagccaccttcgcttaaggcaaatgttttgccttcggctttggcagtgatatttccagagatcacatacaggaacgtttcaatgccttcgccaccgaagccctgttggttgccaccgttttgatgtagtgtgaccagataatcaacaaaagaggcacccagctttggcgtggagaggattgtcgcgtcacaattttcaaagcccggaataatattttttaccagaccatccggggttaacagtgcgaaattaccgtgtttaacaatcgcacggttagccagtaaatcttcgcggtaaccggtgacgttatttaaatatcccatttatgactccttatttctgccaggcaagttgataaagcatgagtgccaacgttttgaccccttcggcaaggtcggtaatattggtgcgttccgccgggttatggctgatcccgttgatgctggggataaaaatcatgcaggttggtacgcgaggcgcgaaaatttgcgcgtcgtgcccggcaccactgtgcatcacccggtaattcagtttttctctttcacacaattctgtcagggtggcgaccagctccttattcatcggcacgggttcttcgtccatccataaatcgatatcaataccaatgtccatttcatcgcaaatcgcccgcatgtcgttttctaactgttgggtgaaatcgcgcagcacggcagcgtcggtatgacgacaatcaatggtgaacgtggttttacccggcaccacatttaccgtattcgggcgcggctctactttgccaaaggtcagaaccagcggatcgcccatccttttcgctttttcgaccgactgatggcaaatgcgactgaaagcgtaaactgtatcacgacgataacccatcggcgtggtgcctgcatggtttgattcgccgttcagcgttaccgtataacgacgctgcccgacaattgcattcaccacgccaattgattgcccattactttccagcacacagccctgttcaatatgcagttcaacaaaggctttaatatcctgacgcggagttagtggggcgttcggaagagtaaatccgcaagccttcatcgcatcgacaaaactatttcctttggcatcacagatattccgcacgtcgtcaggattcgccagcccaaaaatatttttactgccccagaagacatacgggaagcggctgccttcttcttctgccatcgccaccacttcgaccgtacgtagcggcgcgccgtattgcgttttcagccagtcaattgccagccacgccgccagcgcgccgaattgcccgtcaaggttaccgccgttaaccacggtatcgatatgcgaaccgctcagaaccacttcctgtggatattcggtgccattcaggcgaccgtataaattccccacttcatcgaaacgtgtttccagcccgcttgctgccattctttttttaaattgctgctgggtttccagccattccggcgaataaagtaaacgggtcatcccacccgctgggtcagcgccaaaagaggaaagccagggcagcgtttcttctatagcttgacggaaatgtgtaatcataagaaagtcctgtctcaataattattgcgcaaagggatttttcgtttcgtatgacgtgttataaagcgcgtcggaaattaaatactggtaaatatcatcaacaatttcgatgccttcgacggcggctttgcgttgtttaatatcctgatcctgtccgggataataaacctgattaaaaccgggcgcgggggtaatggcatttaattcgcgcatggtctggctaagatgttgacggaataattcgctggaggagaaaaagttcggattaataactatatgtaattgccccaaattacgccctgcgtgtaaatcgtcatacatcgaactaacctgtcgcccgaacggtaagccgagtaagacgcctgagaggacgtcaatcatcatcatcaggccatacccttttggcccggcggcggggagcagagcatgtaccgcgaacggatcggttgttggtacaccgtttttatcgaccgcccaggtatccgggatagacatattacgcgagcgggcgtcgagcacttttccccatgcctgtacggtagtcgccatatcaaaggtaaggatctcgtcgccttctcccggcgcggcaaaggccagggggttagtaccgtagtaaatttccgcgccgccaaacggcaccaccattggatcggactggcacatcgaaatgccaatgaatccggcgcgggctgcctgctgcacaaaataagagattgcgccgctgtgacccatccggctgataccgaccaccgcaacgccattttgctgggcggttttgatggcatgttccatacccattttcgccgcgacctgtccggcggcattgtcggcatgtaaaattgccgagcacggcccggtttcctcaagacgaaactccggttcgcggttggtgccgccttttgaaatgcgttccgcgtagtattccacgcgcaccgcgccatgagagtggatccctctggcatcggcgtaaaccaatacttcagccacggttgcagcgtgctcacgttttaacccagcctggcagagtttattctcaattagctggtggagtgtttcccgactgattttcatctgtcttcctttttaacgacggtgtgaagcatgactgcaattaacatacagggaaaatatctggattatgtgatccagacaggcaagaaaatatagttagaatttatttgataatccgctcacttttaacctgatttttaaaacaaccacgcttattaaaaaataatgagtaatagcctggcggttatttgaattcttttgttaataattcctgtgtgatattcatcaccttatttactcgttgtcatcgataccgtaatcgccacattaacactgctcgtgcaattgccatgggtgcaatttttaaggagttgttatgatccacgcctttattaaaaaagggtgttttcaggattcggtcagtttaatgattatttcacgaaaactcagcgaatcagaaaatgttgatgatgtttccgtaatgatgggtacgcccgccaataaagcgttattagataccacaggtttctggcatgacgattttaataacgccacgccgaacgatatttgcgtggcaattcgtagcgaagcggcggatgcggggatcgcgcaggcgattatgcagcagcttgaagaggcgctaaaacaactggcgcaggggtcaggcagcagccaggcgttgacgcaggtgcgtcgctgggacagtgcctgtcagaaattacccgacgccagtctggcgctgatttcagtggctggcgagtatgcggcggagctggcgaaccaggcgctggatcgcaacctcaacgtgatgatgttctccgataacgtcacgctggaagatgaaatccaacttaaaagccgcgcgcgggaaaaaggcttgctggtgatggggccggactgcggtacgtcgatgattgccggcacgccgctggcttttgctaacgtgatgccggaaggcaatattggcgtcattggcgcttccggtaccgggattcaggaactgtgttcgcagattgcgctggcaggggagggaattactcacgcgattggccttggcgggcgcgacctcagccgtgaagtgggcggcatcagtgcgctgacggcgctggaaatgctcagtgcagacgagaaaagcgaagtgctggcatttgtttcaaaaccgcctgccgaagctgtgcgtctgaaaattgttaatgccatgaaagcaaccggcaaaccgacggtggcgctgtttttaggttataccccggcggtggcccgcgacgagaatgtctggtttgcctcctcgctggatgaggccgcacgcctggcttgcctgctttcacgcgttacggcgcgacgtaacgcgataacgcctgccagcagcggatttatttgcggtttgtataccggcggtaccctggctgccgaagcggcgggattacttgctggacaccttggcgtggaagccgacgatacccatcatcacggcatgatgctcgacgccgatggtcaccagattattgacctcggcgatgatttctacaccgtcgggcgtccccatccgatgatcgacccagccttacgcaatcagttaattgccgatctcggcgctaaaccgcaagtgcgcgtattgctgcttgatgtcgtgattggcttcggtgcgaccgccgatcctgccgcctcgctggtaagcgcctggcaaaaagcctgtgctgcgcgttcagacaatcaaccactgtatgccattgccacggtgacaggcactgaacgtgacccgcaatgccgctcgcagcaaatcgccacgctggaagatgcggggatcgcggtagtgagttcgctgccggaagccaccttgctggcggcggcactgattcgtccgctttcgcctgccactcagcaacacacaccgtcattactggaaaacgtcgccgtgattaacatcggattacgcagctttgcgctggagctacaaagcgccagcaaaccggttgtgcattaccaatggtcgccagtcgccggcggcaataaaaaactggctcgtttattagaacgtttgcaataaggggttcccatgtttacatcagtggcgcaagccaatgctgcggttatcgaacaaattcgtcgcgctcgtccacactggctggatgtgcaaccggcttcttcacttatcagcgaactaaaccagggcaaaacactgcttcacgccgggccgccaatgcgctggcaggagatgaccggacctatgaaaggggcgtgcgtgggcgcatgtctgttcgaaggttgggcgaaagatgaagcgcaggcgctggcaatactggagcagggggaagtgaacttcattccttgtcaccatgtgaatgccgtcgggccaatgggcggtattacttctgccagtatgccgatgctggtggtcgagaacgtgaccgacggcaaccgggcgtactgcaacctcaacgaaggtatcggcaaagtgatgcgttttggcgcttatggcgaagatgtcctgactcgccatcgctggatgcgcgatgtgttaatgccagtattaagcgcggcgctggggcgcatggagcacggtatcgatctcacggcgatgatggcgcagggcattaccatgggcgatgagttccatcaacgcaatattgcttcctcagcactgttaatgcgtacgctggccccacaaattgctcgcctcgatcatgataaacagcacattgcggaagtgatggatttcctcagcgtgaccgatcagttcttcctcaacctcgcgatggcctactgcaaggcggcgatggatgctggcgcgatgatccgcgcaggcagcatcgttacggctatgacccgcaacggcaatatgttcgggattcgggtaagcgggctgggtgaacgctggtttactgcgcctgtaaacactccgcaaggtctgtttttcaccggcttctcgcaggagcaggcgaacccggatatgggcgatagcgcgattaccgaaacctttggtatcggaggtgcggcaatgatcgcagcgcctggcgtaacgcgctttgtcggtgcgggtggcatggaagcggccagggcggtatctgaagagatggcggaaatttaccttgaacgcaatatgcagttgcagatcccaagctgggattttcagggcgcctgcctgggactggacattcgtcgcgtggtagaaaccggtattacgccactcatcaataccggtatcgcccataaagaggcggggatcgggcagattggcgcaggcaccgtgcgggcaccgctggcgtgttttgaacaggcgctggaagcactggctgaaagcatggggattggttgaggaacgcacaatgacgatcatccatcctctgcttgccagtagtagcgcaccgaattatcgccagtcctggcggttagcgggagtgtggcgacgggcgattaacctgatgacggaaagcggcgaactgttaacgctgcatcgtaagggtagtggtttcggccccggaggatgggtgcttcgccgcgcgcaattcgatgcgttatgcggtggattatgcggcaatgaacgaccgcaggttgtggctcaagggattcgcctcgggcgtttcacggttaaacagccacagcgttattgtttgctgcgtattacgccgcctgcgcatcctcaaccgcttgcagctgcatggatgcaacgcgcggaggaaaccgggcttttcgggccactggcgatggcggcaagcgatccgctgcccgctgaattacgccagtttcgtcactgttttcaggccgcgctcaatggcgttaagaccgactggcggcactggctgggtaaaggacccggattaacgccaagtcatgatgatacgctgagcggaatgctgctggcggcctggtattatggcgctttagatgcgcgctctggtcgccagttttttgcctgttccgacaatcttcaactcgttaccacagcggtgagcgtcagttatttacgctacgccgcgcaaggatatttcgcctcgccactcctgcactttgttcatgctctgagttgcccgaaacgtaccgctgttgcgattgattcgctgctggcgctggggcacacgtcaggggcagatacgctgctggggttctggcttggtcaacaattattacaaggaacaccatgaaaacactggttgtagctcttgggggcaacgccttactccagcgcggcgaggcgctgacggcagaaaatcaatatcgcaatatcgccagtgctgtacccgcgctggcgcgcctggcccgttcttatcggctggcgattgttcacggcaacgggccgcaggtggggctgctggcattgcagaatctggcgtggaaagaggtagaaccgtatccgctggatgtgctggtggcggaaagccaggggatgattggctatatgctggcacagagtttgagcgcacagccgcagatgccgcccgtgacgacggtgctgacgcgcattgaggtttcgcctgatgatccggcgtttttgcagccagagaaatttattggtccggtttatcagccagaagaacaagaggcactggaagcggcttacggctggcagatgaaacgtgatggtaaatatttgcgccgggtggtggcgtctccgcaaccgcgtaaaattctcgacagcgaagccatcgagttgttgctcaaagaggggcatgtggtgatttgcagtggcggcggcggtgtgcctgtgacggaagatggggcagggagtgaagcggtgattgataaagatctcgctgctgcgttgctcgctgagcagattaacgccgatgggctggtgatcctcactgatgctgatgcggtatatgaaaactggggaacgccgcagcaacgcgccattcgccatgccacaccggatgagttagcgccatttgccaaagccgatggttcgatggggccgaaggtaacggcggtgagtggttatgtcagaagccgtggtaaacccgcgtggattggggcgttatcgcgaattgaagagacgctggcgggcgaagcggggacctgtatttcgctgtagtcgtaggcattagacatttgtgcctgatgcgacgcttgacgcgtcttatcaggcctacaaccggtgccgcatccggcaattggtgcacaatgcctgatgcgatgcttgacgcatcttatcaggcctacaatgggtaccggatcggtaggccggataaggcgtttacgccgcatccggcaagaatagagcaccagttaaccgaacttactctgcgcccaaatcacgccgctggcatattccggcggcagcagcgggattaaggcttccagcgtcgcagtcagacgcgatgtgtcgctgtcggtcaaattcagatgccccactttacgccccggacggacttctttgtcgtaccagtgcagatgcaccagcggcaatttcagccagtcataattcacatcgctaccaatcagattgatcatcaccgacggattattcactactggttgcggtaacggcagatcggtaatcgcccgcagatgcagctcaaactggctgatgctggcaccgttttgcgtccagtgaccactgttatgcacacgcggagccagttcgttgatcagcagaccttgcggggtgacaaaacactccatcgccatcacgcccacatagcccagctcctgcataatcgccgacagcatctcttcggcttgcgcctgctgctgtgcgttggcctgcggaaaagcgacgctggtgcgcaaaataccgtcctgatgcaggttatgcgtcagcggataaaacacggtgctgccatcaaagccgcgcgcgccaaccagcgacacttcaccagagaagtttatgccctgctcgacaatacattcgccgtagcattcagccggtaactgttcggtttcatcggcgcgtaaacgccattgaccgcgtccgtcatagccaccagtgcgacgcttaacaatcgccagttcacctaaacgatcaaacaccgcaggccactcgctgcgatcggcaagtaactgccacggcgcggtcggcaggtggagcttatcgaaaagctgcttctgagtcagacggtcggcaataatcgggaacacatcgcggttcacaaaggccggatggcgtgccagctcgcgggttaatgcggtttccggccaacgttcgatctcagcggtaatcacgctttgttgaaaaggcaccgccgccggttcagcgtccagcccgaccggccagacagcaatgcctaacggttcgcctgcctgacgcagcatacggcctaactgcccgttaccgaggacgcaaacctgtttcatgccgcacctcgcgggtccgggttttccagcacttcatcagtttgtgctttgcgccagtcattcagacgttggtgcagttctttatcatgagtcgcaagaatttgtgctgccagtaatgccgcgtttgccgcgccagctttaccaatcgccagcgtacccaccggaatgccgcgcggcatttgtacgattgagtagaggctatcgacaccgctcagtgcggcgctctgtactggtacgcccagcaccggcaccagcgttttggcggcaatcatgcctggcaggtgcgctgcgccgcctgcgcccgcaataatcacctgataaccgttctcttcggcgctttcggcgaagctgaacagtttatcgggggtgcggtgagcagaaaccacttcaacgtggtgcgggacattcaggatttcgaagatttcggcggcgaactgcatggtagcccagtcgcttttggaccccatcacgatggcgacacgcgccggattattgcgggaagacatgcgtcttaaaactcctgtggtgcacaactctcggctttagagggcacagagaatagcacggaaagagagtaaggaaaacggttgcgtggctgtgaaatcagcaaagttgcgggttttttaaaacggaaaatgaatcagctcaacgtcatccgccgtgactttcaccatcgaaccttccgtatgccaggcacccagtaccacgcgaaaagcaggttgctggttggcgataagttcatgtaccgccgggcgatgggtatgcccgtgaatcagccattgcacctgatgtttttccatcgcactgaccaccgcgttttggttaacgtccatgatcgccagcgatttactgctgttggcttctttgctgttcgcgcgcattcgcgcggcaatgcgtttgcgcacaaacaatggcagagcgaggaatagcgtctgcagccagggtttgtggactttggcgcgaaaagcctgataacccgcgtcatcggtgcacagcgtgtcgccatgcataatcaacacccgacgaccataaagttcgagcaccttttcttccggcaataacgtcatgccgctttcacgggcaaagcgtttgccgagcagaaaatcacggttgccatgaatgaaataacagggaacgccagaatcggacaccgctttgatcgctgccgccatctggcgatggagtgggttggggtcgtcgtcgccaatccacgcttcaaacagatcgccaagaatatacagcgcgtcggccttgcgagcttcccccgctaaaaaacgcagaaaaccggcggtgatcgccggttcttccacgcagagatgaagatctgcaataaagagtgtcgccacgattactcgctaacggtcacgctttcaatgataacgtcttcttttggcacgtcctggtgcataccgctacgaccggttgcaacacctttgattttgtctaccacgtccatgccttcaaccacttcagcaaacacgcagtagccccaaccttgcaggctttcgccagagaagttcaggaagtcgttatcaaccacgttgatgaagaactgtgcagttgcagagtgcggagcctgagtacgggccattgccagcgtaccacgggtatttttcagaccgttgttggcttcgtttttgatcggttctttggtggctttttgtttcatgcccggttcaaaaccgccgccctgaatcataaagccgttgataacacggtggaaaatggtgttgttgtaaaaaccttcgcggcagtagtccaggaagtttttaactgtttcaggtgctttatcgtcaaaagttttgatgacaatatcgccgtgattggtgtggaaagtaaccatttttgcatcctgttccgtttgattggtgcttcaacccggttcgggtcatatatagggtggtgttatagcataaccgcacgatcggatcatcacgcaatgtatgctgattcgcgcgggaaatatgggtattatacgcaactcaattacccacacatgtctaaacggaatcttcgatgctaaaaatcttcaatactctgacacgccaaaaagaggaatttaagcctattcacgccggggaagtcggcatgtacgtgtgtggaatcaccgtttacgatctctgtcatatcggtcacgggcgtacctttgttgcttttgacgtggttgcgcgctatctgcgtttcctcggctataagctgaagtatgtgcgcaacattaccgatatcgacgacaaaatcatcaaacgcgccaatgaaaatggcgaaagctttgtagcgctggtggatcgcatgatcgccgaaatgcacaaagattttgatgcgttgaacattctgcgcccggatatggagccgcgcgcgacgcaccatatcgcagaaattattgaactcactgaacaactgatcgccaaaggtcacgcttatgtggcggacaacggcgacgtgatgttcgacgtcccgaccgatccgacatatggcgtgctgtcgcgtcaggatctcgaccagctgcaggcaggcgcgcgcgttgacgtggtcgacgacaaacgcaacccgatggacttcgttctgtggaagatgtcgaaagagggcgaaccgagctggccgtctccgtggggcgcgggccgtccaggctggcacattgaatgttcggcaatgaactgcaagcagctgggtaaccactttgatatccacggcggcggttcagacctgatgttcccgcaccacgagaacgaaatcgcgcagtccacctgtgcccatgatggtcagtatgttaactactggatgcactccggaatggtgatggttgaccgcgagaagatgtccaaatcgctgggtaacttctttaccgtgcgcgatgtgctgaaatactacgatgctgaaaccgtgcgttacttcctgatgtcgggccactatcgcagccagctgaactacagcgaagagaacctgaagcaggcgcgtgcggcgctggagcgtctctacactgcgctgcgcggcaccgataaaaccgttgcgcctgccggtggcgaagcgtttgaagcgcgctttattgaagcgatggacgacgatttcaacaccccggaagcctattccgtgctgtttgatatggcgcgtgaagtgaaccgtctgaaagcagaagatatggcagcggcgaatgcaatggcatctcacctgcgtaaactttccgctgtattgggcctgctggagcaagaaccggaagcgttcctgcaaagcggcgcgcaggcagacggcagcgaagtggctgagattgaagcgttaattcaacagcgtctggatgcccgtaaagcgaaagactgggcggcggcagatgcggcgcgtgaccgtcttaacgagatggggatcgtgctggaagatggcccgcaagggaccacctggcgtcgtaagtaattgcgctattgccggatgcgagttttcgcatccggttatcgtccgtgccaccacaacattcccatcagtagaatccccggcaaccacacccacatcaattcagaaataatcacctgatgcccgtacggcgtggtgtaacgagacaatgcaaacggcgcgactttaatcacctgccagggagcgaaaaagcgttcatctgaccacggccacagccagccaacccctttaccgccagtggttaccgaatccagcaagctgtgcgatagcaacgagacggttaaaaacagccagcagcgaatcagcccagccctgaaccatcggcgtccaatcagcacacataacagcgggacaacaaacgcaaacaccagcgaatgggtaaacccgcgatgaccaaaaacattgccgtaagcaatgccaaatttaaacgacaatacgtcggcgtcgggcagcatcgccaggatgattccggcaaataacagacgcggagggatgactttcgaacccaaccctaaaccaatgcataggggaacggcggcgtgcgtaataacggttggcatgatggtcgcttcggcaaaatgtcgatgctatcagcatggatgaacggggcgtagagggcaaaagtctgaaaagagaaccggcctgttgatacaggccgggaaagggatcaggcaacaacctgtacgctgtgacctgcaaaactcactgtctgaccggcgacgattttgcagcgtttgcgcgtttcaaccgcgccatcgactttcacctggccttcggcaatcgcgattttcgcctgcgcgccgctttcgctccagccttccagtttcagcaagtcgcacagctcaacgtgcggatgtttacctaaagaaaatgtcgccatgttactcaccctgtggatcatgatattcaacgcacgcctgtagcgtgttttcaatcagcgtggcaaccgtcatcgggccaacgccgccgggaacaggcgtaatgtatgaggcgcgtttagccgcgtcttcaaacaccacgtcgcccacaactttgccattttccagacggttgatgccgacatcaatcacaattgcgccttctttgatccagtcaccaggaataaagcccggcttgccgacggcaacgatcaacagatcggcattttctacgtgatgacgcagatttttagtgaagcggtgagtcacggtagtggtgcaacctgctagcagcagttccatgctcatcgggcggccaacgatattcgatgcgccaatcaccacggcgttgaggccgaaggtatcaatgttgtaacgctcaagcagcgtgacgatgccgcgcggggtgcagggacgcagacgcggcgcgcgctggcacaggcgaccgacgttataaggatggaaaccgtctacgtctttgtccgggtgaatacgttccagtactttgacgttatcaatacccgccggtaacggcagttgaaccagaatgccatcaatggtgttgtcggcattcagcgcatcgataagctccagcagctccgcttcgctggtggtttccgggaggtcataagagcgggagacgaacccgacttcttcacaagccttgcgtttgcttgcgacataaatttgcgatgcagggttactacccaccagcacaacggccagtcctggtgcccgcagtccggctgcaatacgcgcctgaactttttgagcaacttcagagcgcacctgctgcgcaatcgttttaccgtcaataatctttgctgccatcagagagaggattccatctgttacgtaggtcgaaggggatgcgcctattttgtcagaagcggggcgcgctgtcaggtttcgtttcagatttatcacgtgaagcgacctcttgcgaaggttaggcgcaccgtcgctgaggtcgctgagattgaaagcttcatttttcgtccatgatggcgttgtaaatctggaactgacttatttccttgtctaaggattaagataatttaagaaatacctgacaatataaaaagaattttcagcctggtaatttaccgcttcaggtctatatttgtgttgaatatattttgcgcggaagtattcatctaacggggctctctattttttagaatagagtgcatattttcaattaagacattcttagaggataaaaaggaatttactactatcagtgtcttaaataaagtaatcggttatatacggatgtggagtcgataaatgagattgaaggaatatatatgaaattaagatttatttcgtctgcgctggctgccgcactattcgccgctacgggtagttatgctgccgttgtagatggcggtacaattcactttgaaggcgaactggtgaatgctgcctgttcagtgaatactgactcggcagaccaagttgtcacactcggtcaatatcgtaccgatattttcaatgctgttggtaatacctctgcattaattccattcaccattcagttgaacgactgcgatcctgttgttgccgctaatgctgccgttgcattttctggtcaggctgatgcaatcaatgataatttattggccattgcatccagtaccaatacaacaacagcaacgggtgtcggtattgaaatacttgataatacatccgcaattctcaaacctgatgggaatagcttctcaaccaaccagaacttgatccccgggaccaacgttcttcatttttctgcacgttataaaggcaccggtacaagtgcatcagcagggcaagcaaatgctgacgcgacttttattatgagatacgaataatcaaaaccacgttgttttgaattatatatcacgtcttataacaaagtaatgtaccggttgtctgaagcggtatggtggcaatgtaaatcgaaatcatgttcactttgtatcatgccgctttattaaatgaaaagggaatgatgtgttgtaagaaaccaaagcaatcatttctttatatttcttatttttgccgtcaggaatacacaaggcgtattaactatgatgactaaaataaagttattgatgctcattatattttatttaatcatttcggccagcgcccatgctgccggagggatcgcattaggtgccacgcgtattatttatcccgctgatgctaaacagactgcggtatggattagaaatagccataccaatgagcgttttctggtcaattcgtggattgaaaacagcagcggtgtaaaagaaaagtcattcatcattacaccgccactatttgttagtgaacccaaaagcgaaaatactttgcgtattatttacaccggtccaccgctggcggcagatcgtgagtctctgttctggatgaatgttaagacgatcccttcggtagataaaaatgcattgaacggcaggaatgttttgcaactggcgattttatcgcgcatgaagttatttctccgtccaattcaattacaagaattacccgcagaagcgccggacacactcaagttttcgcgatccggtaactatatcaatgttcataatccatcacctttttatgtcaccctggttaacttacaagtgggcagccaaaagttggggaatgctatggctgcacccagagttaattcacaaattcccttaccctcaggagtgcagggaaagctgaaatttcagaccgttaatgattatggttcagtaaccccggtcagagaagtgaacttaaactaaccgaatcatctgacaatatcagagctaattatgaaaatacccactactacggatattccgcagaggtatacctggtgtctggccggaatttgttattcatctcttgccattttaccctcctttttaagctatgcggaaagttatttcaacccggcatttttattagagaatggcacatccgttgctgatttatcgcgctttgagagaggtaatcatcaacctgcgggcgtgtatcgggtggatctctggcgtaatgatgagttcattggttcacaggatatcgtatttgaatcgacaacagaaaatacaggtgataaatcaggtgggttaatgccctgttttaaccaggtactccttgaacgaattggccttaatagcagtgcatttcccgagttagcccagcagcaaaataataaatgcatcaatttactgaaagctgtacctgatgccacaattaactttgattttgcagcgatgcgcctgaacatcactattcctcagatagcgttgttgagtagcgctcacggttacattccgcctgaagagtgggatgaaggtattcctgctttactcctgaattataatttcactggtaacagaggtaatggtaacgatagctatttttttagtgagctcagcgggattaatattggcccgtggcgtttacgcaacaatggttcctggaactattttcgcggaaatgggtatcattcagaacagtggaataatattggcacctgggtacagcgcgccattattccgctgaaaagtgaactggtaatgggagacggcaatacaggaagtgatattttcgatggtgttggatttcgtggtgtacggctttactcttccgataatatgtatcctgatagccagcaagggtttgccccaacagtacgtgggattgcccgtacggcggcccagctaacgattcggcaaaatggttttattatctatcaaagctatgtttcccccggcgcttttgaaattacagatttgcacccgacatcttcaaatggcgatctggacgtcaccatcgacgagcgcgatggcaatcagcagaattacactattccgtattcaacagtgccaattttacaacgcgaagggcgtttcaaatttgacctgacggcgggcgattttcgtagcggtaatagtcagcaatcatcgcctttcttttttcagggcacggtactcggcggtttaccacaggaatttactgcctacggcgggacgcaattatctgccaattacaccgcctttttattagggctggggcgcaacctcgggaactggggcgcagtgtcgctggatgtgacccatgcgcgcagtcagttagccgacgatagtcgtcatgagggggattctattcgcttcctctatgcgaaatcgatgaacaccttcggcaccaattttcagttaatgggttaccgctattcgacacaaggtttttatacccttgatgatgttgcgtatcgtcgaatggaggggtacgaatatgattacgattacgacggtgagcatcgcgatgaaccgataatcgtgaattaccacaatttacgctttagccgtaaagaccgtttgcagttaaatatttcacaatcacttaatgactttggctcgctttatatctctggtacccatcaaaaatactggaatacatcggattcagatacgtggtatcaggtggggtataccagcagctgggttggcatcagttattcgctctcattttcgtggaatgaatctgtagggatccccgataacgaacgtattgtcggacttaatgtttcagtgcctttcaatgttctgaccaaacgtcgctacacccgggaaaatgcgctcgaccgcgcttatgcctcctttaacgccaaccgtaacagcaacgggcaaaatagctggctggcaggtgtaggtgggaccttactggaaggccacaacctgagttatcacgtaagccagggtgatacctcgaataatgggtatacgggcagcgccacggcaaactggcaggccgcttacggtacgctgggggtcgggtataactacgaccgcgatcaacatgacgttaactggcagctgtctggcggtgtggtcgggcatgaaaatggcataacgctgagccagcctttaggggataccaatgttttgattaaagcgcctggcgcaggcggtgtacgcattgaaaatcaaactggcattttaaccgactggcgcggctatgcggtgatgccgtatgccacggtttatcggtataaccgtatcgcgcttgataccaatacgatggggaattccatcgatgttgaaaaaaatattagcagcgttgtgccgacgcaaggcgcgttggttcgtgccaattttgatacccgcataggcgtgcgggcgctcattaccgttacccagggcggaaaaccggtgccgtttggatcactggtacgggaaaacagtaccggaataaccagtatggtgggtgatgacgggcaagtttatttaagtggtgcgccattgtctggtgaattactggttcagtggggagacggcgcgaactcacgctgcattgcgcactatgtattgccgaagcaaagcttacagcaagccgtcactgttatttcggcagtttgcacacatcctggctcataaaggaaattatcaatgaagataatctgcagattattattggcgatggcatgtttgtgtctggcaaacatatcctgggctactgtttgtgcaaatagtactggcgtagcagaagatgaacactatgatctctcaaatatctttaatagcaccaataaccagccagggcagattgttgttttaccggaaaaatccggctgggtaggtgtctcagcaatttgtccacccggcacgctggtgaattatacataccgtagttatgtcaccaactttattgttcaggaaactatcgataattataaatatatgcaattaaatgattatctattaggtgcgatgagtctggttgatagtgttatggatattcagttccccccgcaaaattatattcggatgggaacagatcctaacgtttcgcaaaaccttccattcggggtgatggattctcgtttaatatttcgtttaaaggttattcgtccctttattaacatggtggagatccccagacaggtgatgtttaccgtgtatgtgacatcaacgccttacgatccgttggttacacctgtttataccattagttttggtggccgggttgaagtaccgcaaaactgcgaattaaatgccgggcagattgttgaatttgattttggtgatatcggcgcatcgttatttagtgcggcagggccgggtaatcgacctgctggtgtcatgccgcaaaccaagagcattgcggtcaaatgtacgaatgttgctgcgcaggcttatttaacaatgcgtctggaagccagtgccgtttctggtcaggcgatggtgtcggacaatcaggatttaggttttattgtcgccgatcagaacgatacgccgatcacgcctaacgatctcaatagcgttattcctttccgtctggatgcagctgcggcagccaatgtcacacttcgcgcctggcctatcagtattaccggtcaaaaaccgaccgaagggccgtttagcgcgctggggtatttacgcgtcgattatcaatgaggtacggagaatgagaagagtactctttagctgtttctgcgggctactgtggagttccagtggatgggcagttgaccctttaggaacgattaatatcaatttgcacggtaacgttgttgatttctcctgtaccgtaaacacagcggatattgataagacggtagatttaggcagatggcctacgacacaactactgaacgctggcgataccacggcactcgtcccttttagcctgcggctggagggatgtcctccgggttcagttgcgattttatttacgggaacgccggcatccgataccaacctgctggctctggatgatcccgcaatggcacaaaccgtcgccatcgaattacgtaatagcgatcgctcccggctcgcactgggggaggcgagcccgactgaggaagtagatgcaaatggcaatgtcacactaaacttttttgccaattatcgagcgttagccagcggtgttcggccaggtgtggcgaaagcggatgcgatatttatgatcaattataattaatattatattaattcgtataatttggcgtagtcgataagctctacaattgaatgcaaacctagcttgccataaatattagatttatgcgcactaactgttttattgctaagtaataacttatcggcaatttctttattagataatccgctaaccagataacgtaatatggtcacttcacgattagatagcacagtgaccgttgaactattcgtactacatttattgctttttatatagttaagcgtttcgctgggaaaaaacgtgtatccggagaggatcatctgaacggcatgaaaaatatcattctgatcattgcatttactgacaaaaccgttagcaccagcttgtatcgctctgccagcataaaagcattctgatttcgatgataaaaataacactttcactgtgctctggatttgtttgatccttttcaggaaggtaaaaccgtctgttccgggcaagtctatatccataatgattaaatcaacaggacgggttcggagataatcgatggttatgcgataatcatccgttttcaggacaatctgcaattcactgtttttttgcaacagaacttcaatagacattctgatgataggatgagtatccataatgatcaccgacgttggtttcatagttaccagtctcataggagcggacaattttccgttaggtcgggaaattgtactttgatacatgaaaatacgggttttcttgattcagacgcgcagcggtgtgcgtttgtttgccgctatagcgaaataaatcagaaaatcagacgcggtcgttcacttgttcagcaaccagatcaaaagccattgactcagcaagggttgaccgtataattcacgcgattacaccgcattgcggtatcaacgcgcccttagctcagttggatagagcaacgaccttctaagtcgtgggccgcaggttcgaatcctgcagggcgcgccattacaattcaatcagttacgccttctttatatcctccataatttcagagtgggacatatttgggacattatcaccaaaaatgtcgtctattttcctcgcatgctctgtcaaatgattaggcgcaaggtgagcatacctacgaaccatttctatggactcccatccgcccatttcctgaagcactgataatgggacgcctgactgaatcagccagcttgcccaggtgtgtctgaggtcatggaaacggaaatcttcaattcctgcacgacgacaagctgatagccatgatgtcttgctgtcgatgcgcatcttcctgaccgcaggcgttgatgttccatctgctcgcttagccgccttggtatgtacaaacacccatttgtgatgcttgcctatttgatcacgcaacactttacaggcggtatcgttcagcgccacaccaatggcgcggtttgatttgctctcttctggattcacccaggcaactcgtcgctgcatgtcgatttgttgccattccagatttatgatgttcgactttctcagaccagttgccagcgcaaacttgacgacagatttcagtggttcggggcactcatcaataaggcgttttgcttcctccttttccagccatctgactcgcttgtttctgaccgctggtatcttgatgacaggcgctttttccagccacttccagtcgcgttctgcagcacggagaatggcctttatcatggcaagatgctttgcctttgtctgagttgatactggctttggttcataaacaggcagttctttacctttcctgatggcggcctgaactttctgtttccatatttctttcgtctttctgttatgcattctgcttacagcagagtaaatctttgcctccgagatatctttaagccttataccctcaaaatgttcaagccagaactcaatccggcttttatctgaatcgagagattttttatcagctttttcctcaagccatcttaggcaggcctcttcaaaagtgacatcaggtaaatcccctagcttttctactcgccagagttctgcttttcgcttgtcgtgcaactcctgagcttgccgcttgtcctttgtgccaagagattccttaattcgtttcccgcccgggagcgaatacgaggcataccatatttcatttctgcggaagagtgacattttctttcctctgttatgccatcacccgcgctcacctggacagtatgcagcggagactgaagcgccgcaatgcaggcttgccgtgttgtgaggtaaggagattttggcttggttggatctttacgtgttgcctgtaggcggcctgttcgtatccagttggtggcggttggtctggatatcttaagaaactgacaggcctcatcgagtgtgaggctgtatgattccatggttacctctgctttttgaacgcatgtcacgtaacttcttaatgtgttctgccgtttcgatctcttctgctatccgatctgcatcagctttattcacaggttcaaagtcatgattaaagcggaacatgctggcgatacatgttctgccttttcggatgtagtgaactttgttgtgggtagaacgcaggattttgcagggagtgccgtggtggtcgacgtaccaggtgttaggaaaaatgattctgaacatttttacacctcagttggacgatgttgaaatttgctgctttggctaacgtatgaaattcttcgtctgtttctactggtattggcacaaacctgactccaatttgagcaaggctatgtgccatctcaatactcgttcttaactcaacaggagatgctttgtgcataccgcctcccgtttattatttatcttctcagccagccgctgtgctttcagtggatttctgataacagaaaggccgggaaatacccagcctcgctttgtaacggagtagacgaaagtgatcgcgcctacccggattgaaccgccccgggtttcctggagagtgttttatctgtgaactcaggctgccagatcattgtttccgatggaagcataataagctttttctgcttctgccggaggagtatggcccagccttcccagcaatcgtcgattgttataccagtccacccacgttagtgtggccagttccacttctgcacggtttttccagctcttacggtgtattacctccgctttgtaaagaccattgatgctctcagccatcgcgttgtcatacgagtcgcctgtactccctgttgatgccagtaatccggcttcttttagtcgctccgtataggccagtgacacatactgagagcctttatcgctgtaatggatggtgccagacggacgacgggcccacaacgcctgctccagcgcatccagcacgaatgtcgtttccatagacgatgagacccgcccccccacgatgtatccggcaaacacatcaatgataaacgccacatagacgaagccctgccatgtgctgacgtaagtaaaatcagccacccacagctggtcaggacgttctgccacgaactgacggtttacgcggtcacctgtggcaacggttttccggctgacggtagtgcggacctttttaccccggagaacaccggcaagtcccataaccgccatgaggcgcgccactgtacatctggccaccctgattccttcccgtaacaactgacgccagactttacgcacaccgtacacctgatgattttcatcgtatacgcgctgtatctctctcttcagccagtcatcgtgctgcgcacgggcactgcgtttatccggatgatgtcgctgttgctgacaatggtaatacgttgacggggcaatatgcagttcgctgcataccggtccgaccccgtactgctcacgcagcttatccagcagtggcatcattttttccagaggcggtcgaactccgccttcgcaaaataagcggaagcctggcgaaggatatcgttactgcggcgcagttcacgattttcacgttccagctctttcagacgctgacgttcagcgctggtgagcccaccatcaccgcccccggtatcccgctcatgctggcgaacccagacacgcagagtctccggcgtacagccaatctttggggcaatggaacaaattgccgcccactgtgagtcatattcatcctgactttccagaaccatacgaatcgcccgctgacggacttcgggggaaaaacgagtatttttagtcatcctgtttacctctttctcagggagtttagtctccaggatttccggggcggttcagatattatcgtgaggatgcgtcatcgccattgctccccaaatacaaaaccaatttcagccagtgcctcgtccattttttcgatgaactccggcaccatctcgtcaaaactcgccatgtacttttcattccgctcaatcacgacataatgcaggccttcacgcttcatgcgcgggtcatagttggcaaagtaccaggcatcttttcgcgtcacccacatgctgtactgcacctgggccatgtaagccgattttattgcctcgaaaccaccgagccggaatttcatgaaatcccgggaggtaaacgggcatttcagttcaaggccgttgccgtcactgcataaaccatcgggagagcaggcggtgcgcatactttcgtcgcgatagatgatcggggattcagtaatattcacgccggaagtgaattcaaacagggttctggcgtcgttctcgtactgttttccccaggccagcgccttagcattaacttccggagccacaccggtgcaaacctcagccagcagggtgtggaagtaggacattttcatgtcaggccacttctttcctgagcggggctttgctatcacgttgtgaacttctgaagcggtgatgacgccgagccgtaatttgtgccatgcatcatccccctgttcgacagctctcacgtcgatcccggtacgctgcaggataatgtccggtatcatgctgccaccttctgctcagtggctttctgtttcaggaatccaagagctttcactgcttcggcctgtgtcagttctgacgatgcgcgaatgtcgcggcgaaatatctgggaacagagcggcaataagtcgtcatcccatgttttatccagggcgatcagcagagtgttaatctcctgcatggtttcatcgttaatggcttttttgctggccccgtggcgttgcaaatgatcgatgcatagcgattcaaacaggtgctggggcaggcctttttccatgtcgtctgccagttctgcctctttctcttcacgggcgatctgctggtagtaacgcgcccagctctgagcctcaagacgatcctgaatgtaataagcgttcatggctgaactcctgaaaatggctgtgaaaatatcgcccgcgaaatgccaggctgattaggaaaacaggaaaggggattagcgattcaggccgttaccgcgtccgtcgagaaaaacttccacgagcaaatcacgggtataagtgcgctcgatgccgcgatgcagataaagccgtccgcgtaaattagctgatgcagtccaggtaccatctttgtgtttgaccagcattcctggcatgaccgcacctcgattaacggtctgcgttccgtaatgttgatgaaccataaaaactcctgcccgtaagctgggctgctgaacatatagagacttctgcgcgtattcaggcggtggatggccgccggttgtcataactaagccgcctcgttgaagcgactgaggtataaagtgttgtgttgatttcagctggtcacaccgacgttcacgcgtccgtttcacccctcgcactccccgaagcctgctgaaattcaaactgcggatctaagcggtcatcgcaacggtgaaacaggtggttaccgtatcgttgtgtcgttgcgatgaatttatttaaaactatagttgttttatcgtcaacaacaaaagttgttttatcggttgttttaaatataactggttgtatttaggatggatttattttgtgacttgcatcgcatagcgataactgaagtgaggtgtggtggttttttggacggtatgagttatgagggggaggaaaagaaaacccggcgcggttgccgggtatgattatcagtcagcccaacctgatttcgagtttatttgggtttctgacattgtgtatttcttaatcgtgtcatcgttaaaaagaatagtaagttcttttttcgtaccgttcgttccgttatggaataatccatagaatggaataaaagtggtgccattaacttttacttttgcaaaggcgtacttccagatctcctttccactgtcagtatatgaaacagcatcaggagaaccaaagtaagatttaacctcattcttggttgttttaccttcctgaagtttagactggacactaatttcagtttcatttttgagttgctggttgcctgaagaagcacacccagccaatacagatgccatcatggcagcgattaggatttttctcattttatgtttccattcattataatcagaaacatcttaacataatgattcgaaataaaaaccgctacgagatagggagacattttgctgacagtagcaacaaatctcagctaacaacgagaatatttactgaaatatgcaaacagatttggcgttcttatagagaatttagtgcaatatctaatccgagtggtataaaccttaaccttcgctcccttaagtcgtagataaattaaccatgcttcctgtacgtctgcggcatgcttccaatgaccttaccgaatatgaacacccggttcatctcgtctttctcgatcgggtcccacggcgagtagctcttgttatcagagataaccagcagcttatccttcatcatttgaagacgttttacatgggcagtgtcgtcgtacagaaacgcatagatgccatcaccgtcgaaagatttaacagtgatatcaacgaacagcaggtcacctggttcgatcgtccctgacatgctgtcacctcgcacgttaatgatgcggatattttccgccttcctgccatcgaacatgtgacgagcatcgtcaaacgagtactcaaccgagcgtagaacttctacaaactcacggttgattacacctggcccggcactgacttctatatcaagaacgtcaattttgaagtatttggaatggctgacagttgattgtattggttgcactgtactgtctgacatatttccaacgccagaagataaccattctgcgcgtacacccaaagcgttcgcgatctccacgattttagttgtttggttagctttccctgtttcgattttctgaatagcagcctggctaaccccgaccaaatccccaagcgccttttgtgtaaggcctcgcgctaatctggcttctttaagtctttctgagagtgttgttttcatagatcaaatgtacaaccaaggttttatttcatcaaacgaaaatggttgttgactaaaaacaaccatagttttaatcttgattcggattaaccacggaggttgttatgaacccagcaatcaaaacagcgatcaatatcgttggttcacaaaagaaactaggcgatgcctgcgaagtttcacagcaggccgtctataagtggcttcacaacaaagcaaaggtatcccctgaacatgtcggcagcattgttacggctactggtggagttgtgaaggcataccagattcgcccggatcttccgaagttgtttccacacaccgaaaagaacgcagcttaaatttccatttcacgctctttaacaataagcaatcaacttaacagtcaattcaaactaaaggagtcaattatgcaaccacttacataccaacagactagcggatttattccgactgcggtgataaatcgttctcaaacaaaacaagctccaggccacgaaaaaatccgtgatgccgtccgcgcctggtcggctgtagataatcaggatgtcgttgccgcactcattgtgaatgagtatcgggagcagggcgacggcaccatcgatttccctgatgatgtcagccgtgcacgccagaagctgttccgcttcctcgataacaaattcgattctgaaaaataccgaaataacgtgcgtgaactgaccccggcaattctggcggtactaccgctggaatatcgcggttacctggttgagcaggatagcttcatgactcggttggctgaaatggaaaaggaactcagtgaggcaaaacaggctgtcattctcaacgcaccacgccaccagaaactgaaggaaatgagtgaaggtattgtgtcgatgtttcgtgtggacccggatctggctggtccattaatggcgatggtgaccaccatgctgggggcaatatgacaggttcagaaatggcgaaagtcggtctgcgggaacagaaccgactttcaggtgcaaatcgtaacacactcattgcgggaggaattatggcaaacactgctgagatattcaattttccagtgccggatgcggcacaaaaggagccgcgcgtggcagatctcgatgatggttatacgcgcattgcaaatgagttgctggaagctgtgatgctggccggattaacacagcaccagcttctggtcttcctggctgtcatgcgcaaaacatatggctttaataaaagactggattgggtgagcaacgagcaactttccgaattgaccgggatattgccgcacaagtgttctgctgcaaaaagcgttctggtaaagcgtgggattcttattcagagcgggcgaaatatcggcattaataatgtggtcagtgaatggtcaacattacccgaatcaggtaagaaaaataaagtttacctgaaagaggtaaatttacctgaatcaggtaagaaaagtttacccaaatcaggtaaaggcgtttacccgaatcaggtaaacacaaaagacaaactaacaaaagacaatataaaacctttttcgtccgagaattctggcgaatcctctgaccagccagaaaacgaccttcctgtggtgaaaccggatgctgcaattcagagtggcagcaagtgggggacagcagaagacctgaccgccgcagagtggatgtttgacatggtgaagaccatcgcgccatcagccagaaaaccgaattttgcagggtgggctaacgatatccgcctgatgcgtgaacgtgacggacgtaaccaccgcgacatgtgcgtgctgttccgctgggcatgccaggacaacttctggtccggtaacgtgctgagtccggccaaactccgcgacaagtggacccagctcgaaatcaaccgaaacaagcaacaggctggcgtgacagccggcaaaccaaaactcgacctgacgaacactgactggatttacggggtggatttatgaaaaacatcgccgcacagatggttaactttgaccgtgagcagatgcgccggatcgccaacaatatgccggaacagtacgacgaaaagccgcaggtacagcaggtagcgcagatcatcaacggtgtgttcagccagttactggcaactttcccggcgagcctggctaaccgtgaccagaatgaactgaacgaaatccgccgccagtgggttctggctttccgggaaaacgggatcaccacaatggaacaggttaacgctggaatgcgcgtagcccgtcggcagaatcgaccattcctgccatcacccgggcagtttgtcgcctggtgccgggaagaagcatctgttaacgccgggctgccaaacgtcagcgagctggttgatatggtttacgagtattgccggaagcgtggcctgtatccggatgcagagtcttatccgtggaaatcgaacgcgcattactggttggttaccaacttgtaccagaacatgcgggccaatgcgctggctgacgcggaattacggcgcaaggctgccgatgaactgacctgtatgacagcgcgaattaaccgtggtgagacgatacctgaaccagtaaaacaacttcctgttatgggcggtagacctctaaatcgtgcacaggctctggcgaagatcgcagaaattaaagctaagttcggactgaaaggagcaagtgtatgacgggcaaagaggcaattattcattacctggggacgcataagagcttctgtgcacaggacgttgccgcggtaacaggcgcaaccgtaaccagcataaatcaggctgcggctaaaatggcgcgggcaggaatcctggtcgttgatggtaaggtctggcgaacggtgtattaccggttcgctaccagagaagaatgggaaggaaaggtgagcacgaatctgatttttaaggagtgtcgccagagtgccgcgatgaaacgggtattgagggtatataaaagaacatcaatgggaacacaatgatgaaacaggtgagttgagttcaaactgtagtacaattctctccagtttgaacaggaaagaatatgctatgaacccttatatttatcttggtggtgcaatacttgcagaggtcattggtacaaccttaatgaagttttcagaaggttttacacggttatggccatctgttggtacaattatttgttattgtgcatcattctggttattagctcagacgctggcttatattcctacagggattgcttatgctatctggtcaggagtcggtattgtcctgattagcttactgtcatggggatttttcggccaacggctggacctgccagccattataggcatgatgttgatttgtgccggtgtgttgattattaatttattgtcacgaagcacaccacattaaaataatttgtttctaaacgactaaaatatggaggctcttatatttatatgagcctcgttttatgctttttgttaatgtctttattttttatgtattcttttgtgctttcaagattatggcgtaagaaaattgcaatacgattattgttgtatattcaagataatgtgaccttaattgtctttttaaataaaaaataaacaaaaattatatcccaccactaaggtttataaaagcatacgttagcaggtgtcaccatgaaaaaagccatagcatatatgcgattttcatcaccaggtcagatgtctggcgactcattaaaccgacagagaagacttattgctgaatggttaaaggtaaatagtgattattatcttgataccataacatatgaagatttaggattaagtgcattcaaaggaaagcatgcacaatcaggagctttttcggaatttttagatgctatagagcatggttatatattgccaggaactacattgttagttgaaagtctggacagactttcaagagaaaaagtcggtgaagcgattgaacgtctgaaattgattttgaatcacggtattgatgttataactctttgcgacaatacagtctataatattggctctttgaatgagccatattcattaataaaagccatacttatagcacaaagggcaaatgaagaaagcgagataaagtcaagtcgggttaaattatcatggaagaaaaaacggcaggatgcactggaatcaggtacgattatgacggcgtcttgtccgagatggctctccttagatgacaaaagaacggcttttgttccagactggatttgcccctatatttccagacatctgttatcacttaacccattacaggcccgctgccgcagatattcccgtggcgagcgataacccagcgcactatgcggatgccattcgttataatgctcgaacgcctctgcaaggttctttgctgccgttaacccgtctggtttgggcatgatactgatgtagtcacgctttatcgttttcacgaagctctctgctattccgttactctccggactccgcaccgccgtgttcttcggttcaagtcccaacatccgggcgaactggcgtgtttcattagcccggtagcatgaaccattatccgtcagccactccactggagacgacggaagatcgttgccgaagcggcgttccaccgctcccagcatgacgtcctgtactgtttcactgttgaagccgccggtagtgaccgcccagtgcagtgcctcacgatcacagcagtccagcgcgaacgtgacacgcagtctctctccgttatcacagcagaactcgaacccgtcagagcaccatcgctgattgctttctttcacggccactctgcctgtatgtgcccgtttcgatggcggtacagcaggttttcgctcaagcaacagcgcattctggcgcatgatccggtaaacacgtttggcattgatcgcaggcataccatcaagttctgcctgtctgcgaagcagcgcccatacccgacgataaccatacgttggcagctctccgataacatggtgtatacggagaagcacatccgtatcatcagtgtgacgactgcggcggccatccatccagtcatcggttcgtctgagaatgacgtgcaactgcgcacgcgacacccggagacaacggctgactaagcttactccccatccccgggcaataagggcgcgtgcgctatccacttttttgcccgtccatattcaacggcttctttgaggagttcattttccatcgttttcttgccgagcaggcgctggagttctttaatctgcttcatggcggcagcaagttcagaggcaggaacaacctgttctccggcggcgacagcagtaagacttccttcctggtattgcttacgccagagaaataactggctggctgctacaccatgttgccgggcaacgagggagaccgtcatccccggttcaaagctctgctgaacaattgcgatcttttcctgtgtggtacgccgtctgcgtttctccggccctaagacatcaatcatctgttctccaatgactagtctaaaaactagtattaagactatcacttatttaagtgatactggttgtctggagattcagggggccagtctacagaccccgacagggtgaaaactattgagctaatttttaaactcaggatggaaaggcgctcattgaatgcaatagccaagtatttaaatgatcatgctgtaaagaatttctcaggaaaagaaagtgcatggggaccttctgtaattgaaaaattattagcgaataaagctctgataggtatttgcgtaccttcatatcgtgcaagagggaaagggataagtgaaatcgctggctattatcccagagtcatatcagatgatttgttttacgctgtacaggaaattcggttggcaccttttggtattagcaatagtagcaagaatcctatgctaataaatctacttcgaacagttatgaagtgtgaggcttgtggtaataccatgattgttcatgcggtatctggaagtttgcatggctattatgtttgtccgatgagaagattacatcgatgtgacaggccatcaataaaaagagatttggttgattataatatcattaatgaattgctttttaattgtagcaaaattcaaccagttgaaaacaagaaagatgctaatgaaactttagagttaaaaattattgagcttcagatgaaaattaataatttaatcgttgcattgtctgtcgcgcctgaagttaccgctatagcagagaaaataagactattagataaggaattacgaagggcttcggtatcattgaaaactttgaagagtaaaggtgtaaattcattcagtgatttttatgctattgacttaaccagtaaaaatggacgagagttatgccgtacacttgcctataaaacattcgaaaaaatcataattaatacggataataaaacctgtgatatctattttatgaatggcattgtttttaaacactatcctttaatgaaagtaatatccgcccagcaggcgataagtgctctcaaatatatggttgatggtgagatttatttctaaataatgatctcggattttaagttatgctatggtgataaagtgcaagacagaattaattatctttgacgaaacttaatgggtaattactttgtttgctcccacaagcgagttttgtacggctgtattggggtagtaaatgagctatacaatcttaatcatttgttaggtgagaactcttggtcgcagattcaaatactgaaaatacgtgacaaattattatgagcaaaatggtgtatgtcacgtattttgaatggtaggttaaaaaataacaccgactttcgtaggtgttactaataataaagcagagtttttagatagtatcaatgtgctttgtgtatattgtggcaaataattgggttgggggtacaattgtgattgcttttgcatgaacattgcgcctttatgcataatgagataaaggaatatcaaataaaataacgataggtcataacaaagaggtttttatgaaaacacttatcgtttcaactgtattggcattcataacattttctgcgcaggctgcagcatttcaggtcactagtaatgaaataaaaacaggagagcaacttacaacgtctcatgtcttttctggatttgggtgtgaaggtggtaatacatcgccctcattaacctggtctggtgttcctgaaggtaccaaaagctttgccgtaactgtatatgatccagatgcacctacaggcagtggttggtggcattggactgttgttaatattccagcaacagtaacatatttgcccgttgatgcagggagacgtgatggaacaaaactgccgactggtgctgttcaaggccgaaatgattttggctatgctgggtttggtggcgcatgtcctcctaaaggagataaaccacatcattaccagtttaaagtatgggctctaaaaactgaaaagattcctgtagattctaactccagcggagcgttagttggttatatgcttaatgctaataaaatcgcaaccgctgagataacaccagtttatgagataaagtagggtgagagtatgctggcaagaggtaagactaacttaaagatcgaagaaatacggatgcataaacatcatgagattcatagggttaagcctcttatgccagctttgtgtcgtatccgtcagggaaagaaagttatcaattgggagacgcatactttaactgttgataataatcaaataatattatttccttgtggttatgaattttatattgagaattatcctgaagcagggctttatcttgcagaaatgctttacttacccattgatttaattgagagtttccaaaaactttatacggtaactgatcaaatacgtaacaaaacaagtttctttttacctcagaatcctgagttaatatattgttgggagcaactaaaaacatctgtttcccgaggcttctcaactaaaattcaggagcacttagcaatgggcgttctactttcgttaggagtgaatcatgttaatcatttacttttatcatatagtaaacaatcattgataagtcgttgttataacctgctgctatccgaacccggcacaaaatggacagcaaacaaggttgctcgatatctctacatttctgtttctacattacatcgccgtctagcaagcgagggggtaagtttccaaagtatactggacgatgtgaggttaaataatgcgttgtctgctatacaaacgacggtaaaacctataagcgagattgccagagaaaatggttataagtgtccttctcgttttactgaaagatttcataatcgttttaatataacaccaagagagataagaaaagcttccagagagtaaaagtgttttaagaaggagcaattctatcgattttgattttgggaaatcaacacggcataattatgtcaccggagcctgaacaactccggtgacttctgcgctaaacggggacgtttatgcgcacatacaatccaaactctcttctcccttcacagatgcagaaatgcacctgcaattctttgcatctagcgtttgacctctgcggaggggaagcgtgaacctctcacaagacggcatcaaattacatcgcggcaacttcaccgctatcggtcggcagatccagccttatctggaggagggcaaatgctttcgcatggtgcttaaaccgtggcgtgagaaacgcagtctttcccagaatgcactcagccacatgtggtacagcgaaatcagtgaatacctcatcagcaggggtaaaacgttcgccactccagcttgggtaaaagatgctctcaaacacacatatctcggttatgaaaccaaagacctggttgatgtcgtaaccggtgatatcaccactatccagtcgttacgccatacctccgatcttgataccggagagatgtatgtcttcctgtgtaaggttgaagcctgggcgatgaatattggttgccacctgactattccacagagctgcgagttccagctgctgcgcgacaagcaggaggcgtaatggctacaccgcttattcgtgtcatgaacggacacatctacagagtaccaaatcgtcgtaagcgtaaacctgagctgaagccatccgaaataccaacactgctcggatataccgccagcttggttgataaaaaatggttgcgactggcagcaaggaggagtcatggctgatttgagaaaagcagcgcgtggtcgggaatgccaggtaagaatccctggcgtatgtaatggcaaccctgaaacgtctgtactggcacatatccggctgactggattgtgcggcaccggtacgaaaccgccagacctgattgccaccattgcatgttctgcctgccacgacgaaatcgaccgccgcacgcattttgttgacgctggatatgcaaaagaatgcgcgctggaaggtatggcgagaacacaggttatctggctgaaagagggggttattaaggcgtgaatacctacagcatcacattaccctggcctccgagcaataatcgctattaccgccataatcgcgggcgcacgcacgtcagcgcagaggggcaggcataccgcgataacgtcgcccgaatcattaaaaacgcaatgctggatatcggcctggctatgcctgtgaaaatccgcattgagtgccacatgccggatcgccgtcgccgtgacctggataatctgcaaaaagccgcttttgacgcactcactaaagcaggtttctggctggatgatgctcaggtcgttgattaccgcgttgtgaagatgcctgttaccaaaggtgggaggctggaactgaccatcaccgaaatggggaatgaatgatgtttgagtttaatatggcagaacttcttcgccaccgctgggggcgtctgcgcttatatcgtttccccggttctgttttgaccgattaccgaatactgaagaattacgccaaaaccctgacaggagcaggagtatgaagtcagagataacaatcaactaatactgttttgttgatttttgcttgtaattggcgttctggtctgatttttgtggagtaagttgatgcgtgatattcagatggttcttgagcgttggggagcgtgggcggctaataatcatgaagatgtgacctggtcgtccattgccgccggttttaagggattaattacttcaaaagtaaaatctcgcccgcaatgttgtgacgatgacgcgatgatcatttgcgggtgcatggcccgtctgaaaaagaacaacagcgatttgcacgatttattagtagattattatgtagtcggtatgacattcatgtcactggcaggtaagcattgctgctctgatggttatatcgggaaaaggttacagaaggctgagggcataattgaagggatgttaatggcattagatatccggttagagatggatatcgttgttaataactctaattaatatgccaattgtttactaaaaattattaaaaatggggcgttgagacgcccccaaaaataaagggtaatatataacagaaggtttatatagttagaagcaaggttgtgcttctaaaggaagtggcttgagggagccacttatatgttggggaggcaacgcctcccgcaacatatctttttcgtaatcagattagaactggtaaaccagacctacagcaacgatgtcatctgaaccgccccggaaatcctggagactaaactccctgagaaagaggtaaacaggatgactaaaaatactcgtttttcccccgaagtccgtcagcgggcgattcgtatggttctggaaagtcaggatgaatatgactcacagtgggcggcaatttgttccattgccccaaagattggctgtacgccggagactctgcgtgtctgggttcgccagcatgagcgggataccgggggcggtgatggtgggctcaccagcgctgaacgtcagcgtctgaaagagctggaacgtgaaaatcgtgaactgcgccgcagtaacgatatccttcgccaggcttccgcttattttgcgaaggcggagttcgaccgcctctggaaaaaatgatgccactgctggataagctgcgtgagcagtacggggtcggaccggtatgcagcgaactgcatattgccccgtcaacgtattaccattgtcagcaacagcgacatcatccggataaacgcagtgcccgtgcgcagcacgacgactggctgaagagagagatacagcgcgtatacgatgaaaatcatcaggtgtacggtgtgcgtaaagtctggcgtcagttgttacgggaaggaatcagggtggccagatgtacagtggcacgtctcatggcggttatgggacttgccggtgttctccggggtaaaaaggtccgtacgaccatcagccggaaagccgttgccgcaggcgaccgcgtaaaccgtcagttcgtggcagaacgacctgaccagctgtgggtggctgattttacttacgtcagcacatggcagggcttcgtctatgtggcgtttatcattgatgtgtttgccggatacatcgtggggtggcgggtctcatcgtctatggaaacgacattcgtgctggatgcgctggagcaggcgttgtgggcccgtcgtccgtctggcaccatccatcacagcgataaaggctctcagtatgtgtcactggcctatacggagcgactaaaagaagccggattactggcatcaacagggagtacaggcgactcgtatgacaacgcgatggctgagagcatcaatggtctttacaaagcggaggtaatacaccgtaagagctggaaaaaccgtgcagaagtggaactggccacactaacgtgggtggactggtataacaatcgacgattgctgggaaggctgggccatactcctccggcagaagcagaaaaagcttattatgcttccatcggaaacgatgatctggcagcctgagttcacagataaaacactctccaggaaacccggggcggttcaatcagtgcttacaccgagtgctttagtgaagtcatttttgtcaagcaggttgattttgtaatcaacgaaagtagacatatttttgttgaagtaataggttgcacctacatcaacatatttgactaagtcctgatcgccccatactccaagatccttacctttagattgcaggtaagcaacggacggacgcagaccgaaatcgaactgatattgtgcaacagcttcgaagttttgggctttattagcaacgaagtgatcagcaaatacagtcatattctgggtttcagaataggtagtggccaggtaaatgttgttagcgtcatatttcagacctgcggcccaaacttctgcatttttaccggaagcaaatacttcaggaagaactttccctgcattaacttgagtgtcggtacgatcagatttcgcataagttgcaccgataccgaatccttcgtattcataggtagcagagaaaccgaagccatcaccgttaccttcagtgtagttatcgaaatcgctacgatcgtttttgccttggtactgagcagcaaagttcagaccatcaaccagaccaaagaagtcgttgttacgataggttgcaacaccagttgcacgttgagtcatgaacacgtcggtttgagtccaagtgtcaccaccgaattctggcaggacgtcagtccacgcaccgatgtcgtatgctacaccgtagttacggccgtaatcgatggagccgtagtcaccgaatttcaggccagcgaaggcaagacgggttttatctttggaggaaccttgagattcagcgcggttgcctttgaattcatattcccactgaccgaaaccagtcagttgatcgttgatttgggtttcacctttgaagccaagatgggcataagtagtatcaccatcatctgcatcattagaggagaagtagtgcttagcattaactttcccgtacagatccagcttgttactgtctttattataaatttcagctgcctgagcagacatcgccatcagtactgatgcagctacagcagaaattgccactgttaattttttcatcgtgagccctttttttgaactattattaaaaaatgatgtcactgcgcgataaatattcatctaatcaatgtgattatttcaagatgtaagttttggtttctcgtttgatttgtgaagtagatctctatttttatctgaacttttttctatcgaatcctattcatggctcttggctgaataaaaataaatctattagccaatttatattaacggctgttatttataagcgctctataatttgaaggttcaatttaaaccggctaaaaataacactggaaattattttttggttatttgttgagatttgcttatgtatttgtagtggtgttttcaatactcggtagcattctctcaaatatcatttagtggtttacgtacgtaaaaaattggttatgctgttaagagtggttacttcgtcacacagcttaaacccgccgtcgagcgggtttttccattttttgagtctcgatattagctgataacccaatacctgagttattcactgactccgagtctgttacgtttcgtagtattccctcaatttacacccgctttgtctgcgaggtggggttatgaaatccatggataagttaacaacgggtgtcgcctatggcacctcagcaggtagtgccgggtactggtttttacagctgctagataaagtcactccctcacagtgggcagcaataggtgtgctgggtagcctggtatttggcctgctgacgtacctgacaaacctttatttcaagattaaagaagataagcgcaaggctgcgagaggtgaataatgcctccatcattacgaaaagccgttgctgctgctattggtggcggagcaattgctatagcatcagtgttaatcactggcccaagtggtaacgatggtctggaaggtgtcagctacataccatacaaagatattgttggtgtatggactgtatgtcacggacacaccggaaaagacatcatgctcggtaaaacgtataccaaagcagaatgcaaagcactcttgaataaagaccttgccactgtcgccagacaaattaacccgtatatcaaagtcgatataccggaaacaacgcgcggcgctctttactcattcgtttacaacgtgggtgctggcaattttagaacatcgacgcttcttcgcaaaataaaccagggcgatatcaaaggcgcatgtgatcagctgcgtcgctggacatacgctggcggtaagcaatggaaaggcctgatgactcgtcgtgagattgagcgtgaagtctgtttgtgggggcaacagtgagcagagtaaccgcgattatatccgctctgattatctgcatcatcgtcagcctgtcatgggcggtcaatcattaccgtgataacgcaatcgcctacaaagtccagcgcgacaaaaatgccagagaactgaagctagcgaacgcggcaattactgacatgcagatgcgtcagcgtgatgttgctgcgctcgatgcaaaatacacgaaggagttagctgatgcgaaagctgaaaatgatgctctgcgtgatgatgttgccgctggtcgtcgtcggttgcacatcaaagcagtctgtcagtcagtgcgtgaagccaccacggcctccggcgtggataatgcagcctccccccgactggcagacaccgctgaacgggattatttcaccctcagagagaggctgatcactatgcaaaaacaactggaaggaacccagaagtatattaatgagcagtgcagatagagctgaccatatcgatgggcaactcatgcaattattttgagcaatacacacgcgcttccagcggagtataaatgcctaaagtaataaaaccgagcaatccatttacgaatgtttgctgggtttctgttttaacaacattttctgcgccgccacaaattttagctgcatcgacagttttcttctgcccaattccagaaacgaagaaatgatgggtgatggtttcctttggtgctactgctgtctgtttgttttgaacagtaaatgtctgttgagcacatcctgtaataagcagggccagcgcagtagcgagtagcatttttttcatggtgttattcccgatgctttttgaagttcgcagaatcgtatgtgtagaaaattaaacaaaccctaaacaatgagttgaaatttcatattgttaatatttattaatgtatgccaggtgcgatgaatcgtcattgtattcccggattaactatgtccacagccctgacggggaacttctctgcgggagtgtccgggaataattaaaaacgatgcacacagggtttagcgcgtacatgtattgtattatgccaacaccccggtgctgacacggaagaaaccggacgttatgatttagcgtggaaagatttgtgtagtgttctgaatgctctcagtaaatagtaatgaattatcaaaggtatagtaatatcttttatgttcgtggatatttgtaatccatcggaaaactcctgctttagcaagattttccctgtattgctgaaatgtgatttctcttgatttcaacctatcataggacgtttctataagatgcgtatttcttgagaatttaacatttacaacctttttaagtccttttattaacacggtgttatcgttttctaacacaatgtgaatattatctgtggctagatagtaaatataatgtgagacattgtgacgttttagttcagaataaaacaattcacagtttaaatcttttcgcacttgatcgaatatttctttaaaaatggcaacctgagccattggtaaaaccttccatgtgatacgagggcgcgtagtttgcattatcgtttttatcgcttcaatctggtctgacctctttgtgttttgttgatgatttatgtcaaatattaggaatgttttcaattaatagtattggttgcgtaacaaagtgcggtcctgctggcattctggagggaaatacaaccgacagatgtatgtaaggccaacgtgctcaaaccttcatacagaaagatttgaagtaatattttaaccgctagatgaagagcaagcgcatggagcgacaaaatgaataaagaacaatctgctgatgatccctccgtggatctgattcgtgtaaaaaatatgcttaatagcaccatttctatgagttaccctgatgttgtaattgcatgtatagaacataaggtgtctctggaagcattcagggcaattgaggcagcgttggtgaagcacgataataatatgaaggattattccctggtggttgactgatcaccataactgctaatcattcaaactacttaacctgtgacagagccaacacgcagtctgtcactgtcaggaaagtggtaaaactgcaactcaattactgcaatgccctcgtaattaagtgaatttacaatatcgtcctgttcggagggaagaacgcgggatgttcattcttcatcacttttaattgatgtatatgctctcttttctgacgttagcctccgacggcaggcttcaatgacccaggctgagaaattcccggaccctttttgctcaagagcgatgttaatttgttcaatcatttggttaggaaagcggatgttgcgggttgttgttctgcgggttctgttcttagttgacatgaggttgccccgtattcagtgtcgctgatttgtattgtctgaagttgtttttacgttaagttgatgcagatcaattaatacgatacctgcgtcataattgattatttgacgtggtttgatggcgtagatgcacgttgtgacatgtagatgataattattatcattttgtgggtcctttccggcgatccgacaggttacggggcggcgacctcgcgggttttcgctatttatgaaaattttccggtttaaggcgtttccgttcttcttcgtcataacttaatgtttttatttaaaataccctctgaaaagaaaggaaacgacaggtgctgaaagcgagctttttggcctctgtcgtttcctttctctgtttttgtccgtggaatgaacaatggaagtcaacaaaaagcagctggctgacattttcggtgcgagtatccgtaccattcagaactggcaggaacagggaatgcccgttctgcgaggcggtggcaagggcaatgaggtgctttatgactctgccgccgtcataaaatggtatgccgaaagggatgctgaaattgagaacgaaaagctgcgccgggaggttgaagaactgcggcaagccagcgaggcagatctccagccaggaactattgagtacgaacgccatcgacttacgcgtgcgcaggccgacgcacaggagctgaagaatgccagagactccgctgaagtggtggaaaccgcattctgtactttcgtgttgtcgcggatcgcaggtgaaattgccagtattctcgacgggatccccctgtcggtgcagcggcgttttccggaactggaaaaccgacatgttgatttcctgaaacgggatatcatcaaagccatgaacaaagcagccgcgctggatgaactgatgcctgatggcgctgtgattcatattgttcccagagtcgccggggccaagtctggtggtgtattccagattgtcctgggagcagccgccattgccggatcattctttaccgccggagccacccttgcagcatggggggcagccattggggccggtggtatgaccggcatcctgttttctctcggtgccagtatggtgctcggtggtgtggcgcagatgctggcaccgaaagccagaactccccgtacacagacaacggataacggcaaacagaacacctatttctcctcactggataacatggttggatggattaaaaagcgtgctgctgaacagtacgccagtgctggacagtgaggggaataccaacatctccggcgtcacggtggtgttccgggccggtgagcaggagcagacaccgccggagggatttgaatcctccggctccgagacggtgctgggtacggaagtgaaatacgacacgccgatcacccggaccatcacgtcggcaaacattgaccgactgcgttttaccttcggcgtgcaggcactggtggaaaccacctcaaagggggacaggaatccgtcggaagtccgcctgctggttcagatacagcgtaatggtggctgggtgacggaaaaagacatcaccattaagggcaaaaccacctcgcagtatctggcctcggtggtggtgggtaacctgccgccgcgcccgttcaatatccggatgcgcaggatgacgccggacagcaccacagaccagctgcagaacaaaacgctctggtcgtcatacaccgaaattatcgatgtgaaacagtgctacccgaacacggcactggtcggcgtgcaggtggactcggagcagttcggcagccagcaggtgagccgtaattatcatctgcgcgggcgcattctgcaggtgccgtcgaactataacccgcagacgcggcaatacagcggtatctgggatggaacgtttaagccagcatacagcaacaacatggcctggtgtctgtgggatatgctgacccacccgcgctacggcatggggaaacgtcttggtgcggcggatgtggacaaatgggcgctgtatgtcatcggccagtattgcgaccagtcggtgccggacggttttggcggcacggagtcgcgcatcacctgtaacgcttacctgaccacacagcgtaaggcgtgggatgttctcagtgatttctgctcggcgatgcgctgtatgccggtatggaacgggcagacgctgacgttcgtgcaggaccgaccgtcggataaggtgtggacctataaccgcagtaatgtggtgatgccggatgatggcgcgccgttccgctacagtttcagcgccctgaaggaccgccataatgccgttgaggtgaactggattgacccgaataacggctgggagacggcgacagagcttgtggaggacacgcaggccattctccgttacggtcgtaacgtcacgaagatggatgcctttggctgtaccagccgggggcaggcacaccgcgccgggctgtggctgattaaaacggagctgctggaaacgcagaccgtggacttcagcgtgggtgctgaagggcttcgccatgtaccgggcgatgtcattgaaatctgcgatgatgactatgccggtatcagcaccggcgggcgcgtgctggcggtgaacagccagagccggacgctgacgctcgaccgtgaaatcacgctgccatcctccggtaccacgctgataagcctggttgacggaagtggcaatccggtcagcgtggaggtccagtccgtcaccgacggcgtgaaggtaaaagtgagccgtgttcctgacggcgttgccggatacagcgtatgggggctgaagttgccgacgttgcgccagcgcctgttccgctgtgtgagtatccgtgagaacgatgacggcacgtatgccatcactgccgtgcagcatgtaccggaaaaagaagccatcgtggataacggggcgcactttgacggcgaccagagcggcacggtgaatggtgtcacgccgccagcggtgcagcacctgactgccgaagtcaccgcagacagcggggagtatcaggtactggcccgctgggacacgccgaaggtggtgaagggcgtgagctttatgcttcgcctgaccgtggcagcggatgacggcagtgagcggctggtcagcacggcccggacgacggaaaccacataccgcttcacgcaactggcgctgggacggtacacgctgacagtccgggcggtaaatgcgtggggacagcagggcgatccggcgtcggtatcgttccggattgccgcaccggtagcaccgtcgcggattgagctgacgccgggctattttcagataactgccacgccgcatcttgcggtttatgacccgacagtacagtttgagttctggttctcggaaaaacggattgctggtatcaggcaggttgaaaccacagcgcgctatcttggcacggcgctgtactggataagtggtgtgtaaattttagccccatcatctgtgttttttttcattaatttcaccatgttatagttttatttgtgaattaaatcaattatggcaatgaattacaaggggttaaatgctgccgcagcatagcgatattgaaatagcctggtatgcttcaatacagcaggagccgaatagctggaagaccgtcaccacacagttctacatccaggaattcagtgagtatattgcgccactgcaggatgctgtagatctggaaatcgcaacggagaaagaaagatcgttgctggaagcctgaaaaaagtatcgggtgctgctaaaccgtgtggacacttccgtagcaccagatatcgagtggcttattcaaccataataaacagtatgtatatcataggttattaattgtgagttttttcggtgtgttatttgtttgtttgatgttatgcttttgcgccccaaaaggttgtttagatgtattttatcaattgattttcaatatcgtttaataaagaaaaattaagcaagctggatgttggttttttgttaattgaatggttctaataatgtttttttactgttgttgaatgtgacttgataagaaatgcaagtaaaaatgatactctttttattttaaattcaaacggttgacatatatatagcaagaggtttcaggtgcgttgtagtgagtttatgttaataaaaagtatagtaagcgttgaaaaatgtaactttgaaatacgttagaataaaaaacaatatacatataataatttaatcttaaatgaaatttattaaaatttgcaaaaatataattttgtgtataaaaatataaatgcacatcatcctgattatgattgtgtatttaattggttgttatttgactgctatcaacttgttttaattttatgataggtgcaagatggattatgtttgctccgtagttttcatctgtcaatcatttgatttaattataaacaggagagttatctcgttcaaaaaaaattcattgtttattgtaagcgacaaaattagaagggagttaccagtatgcccctctaaactaagaattgttgatatagataagaaaacatgtttatccttttttatcgacgtgaataatgagctgcctggcaaatttactcttgataagaatggctatattgctgaaggggaacctccattatcgcttgttttttctctgtttgaagggattaaaatagcagactcacactccctttggttaaaagaaagactatgtatatccttacttgccatgttcaaaaaacgcgaaagtgtaaattcttttatactaacaaatataaatacatttacctgtaaaattactggaataatcagttttaatattgagcggcaatggcatttaaaagatattgcggaattgatttatacgagtgaaagtttaataaaaaaaagattaagggatgaaggaacatcatttactgaaatattgagagatactaggatgaggtatgcaaaaaaactcataacttcaaactcttattctatcaatgtcgtagcccagaaatgtggctataacagtacttcatatttcatatgtgcatttaaagattattatggtgtcacgccatctcattattttgagaaaataatcggcgtcacagatggaataaacaaaacaattgactgataatgtttattacaagttgtctacatgttaattataatattatacagcgttttttctgatgtgatattctggaaccattaatttgtaattgggttgctgtcgcctattttatacatactataattgatggttttctatgtgatttagttaataaccttctgggtttattttaagggttaattgttacattgaaatggctagttattccccggggcgattttcacctcggggaaattttagttggcgttcttaaaatgtgtacttaagaccagcagtagtgatgaagttatagttttctatacctgctccatttttgctgtagtctgaagtgttattattgtgatcataaagtgaagtattaccttttttattcgtaacccgattccatgcgccttcaacataaacttttgcgttaggtgtgacgtaataacctgcattgactgcaacagaatagtaattttggtctttgaccttactgcgataagtgattctttttcccgggtcatagtgttcatcgttatcagatgattccacccagccgctgtatttaaatgtgccaccgagttcaaaatcttcataacgataacttccagtcaagccaatgtagggcattttaaaacgttgtttgtagccgattgccctttctccattcgggaaggagccgatatcatctctgaatccctcctcagaactgtagatataggaaccacctctggctgtaaagctataacggctttcctgatatccggccatgagtcccaggcggtaattgggttcgttgaggagccagcctttgatattcagatcaaattcgttggcataattgagttgtgtatcagggtgtctactttcatccgtccaggttccggggttactggaatccatccagtcctgatcgaccatattgccacctcggctgccgagagttgtccagccagcagccccgatagatatctggggcatcaaatcccaattaattgcacctttaataattgcagcgttattgaatttccagtcgagttgactgacttttcggcctccttcttcggctagataaacacgctcttttgtttttccgctcagagttccaagactaatgtccgcatttatgttgtcaggagtaaacgataaagtctcggtagaagcaaaagagctgatcgcaataggggttgtcaggagtattcccagaagtttcgcccgcataaaagttctccattcaatcgttttaatgattgaatatgtattttttatatctaacttaatgagtcaattacatattgctccactgtttatattttgtttagtattgaatgattatcacaatgcgctatctgtttttggtttaattatctgttattgtttcatattgcggttttactgtgtggtttttttatgcttttgtggtgcttttatctatttaagtgccatgcctttagaggcatataagcgaaaatagcatgaggtttatcctcaattactatgttttttagtacaaaaaagagggacaaaactgagacacataaggcctcacaatggcttgcaaggctttacatgttttgaggtagtgggacgtgtgagcgcagagatggcgcggtaagttgttgacttaaaatgtcgttctaggaacttctaagtcgtgggccgcaggttcgaatcctgcagggcgcgccatttcttcctcatttatgcccgtcttatccgtttccgctttgcccttcaccacatcactttttgtcgctgtttggcgagataattcaacggtgtcaggccgtaaaacgccttaaaaacagagataaagtacgacgtgctgctatagccacataattgcgccacctgagtgatatttttgttatccatcaataacatctgtacggcgtaacgcatacgacactctgtgacaatctggctatagctggtattttcgttttttaatttctttttgagcaggctggggcttaaacatagcgaactggcgacaattcgcagattccagtaatgctgaatatcgctttgaataatgcggcagacgctgtcgcggacgctgctgcgtaagatatacatcagtagggcaataaactgcgattgctcaagaaagttagacaatacggtaaaaagcaatgcgcgcgtcaactccgcttcgcagggtctgctgggttgctgcttgctgtggttggcggctagccggaacacttccggtgtacggctatgacaagcgataaccggggttgccagccgcgaccagggctttacacaggttaagttcttatttaaaaacaacagataatcgttgatgatgttacggttgatgtgggtgattaatacgtgatttaacgttgagagttcaatgacgttattgttgcacgcgaaggcggccaggtagtttttcggaagggtaaacgtagcatggttattgacgcttacctctacctctttttcggtcaggatcaccacgcaaggttcactgctgctcaattgcatttcgcactcctcagatatcagaaactccgctcaaaggatctatgcttcctgcatgagtgatcggcccgttcgccgataacgatcttctttctttagcacgctttttagcaattaatcttgatggaattctgatgagagcgaaagaggtaagccaggtcgtacccgacttacctggaggagatttaatactcgagaatgccgtgcgcgacgggcaaatagcgcagagagaaatagagagtgtctttaccgcaagaggaacgtttcgctaacagcgaggcaatttctgcgtccggtttcggtttcgctgtaaaggttttgcctttgccggcgacaaaaagttcataaacaacgccgctggcaggggcgggactttggcaatcggcgctggcctgtaaataacgttcacgctgttcagcggtcagtttatccacgccgctgccatcctgtacccagacattaacgccggttgctttaacgtgttccagcagttggcgatagccatcgggcgacatgtttccggcgaaaaaactactgatataaaccggttttgctgaaacatcgctaatcagccgctgcgcgttgtttaaccatgttagcaaaggctgacgggcggcttcgctgcgccagttcaggtcgtcaatttccgcgctgatgtaccagccatccggcgttatgccaggcgcggcgctccataatctggcttgctggagatcggcagccagcaggcgattaagatagctttccagcgctgcggacgactgtttctggtgcataaaaaattccggatcggcgttcagcccgacaataagcttcagaccagcctgttgcgcagctgcggcccgcttaaacaataacgtgcgctgttctggctgggtaaatgcatcgccgtaacgggtccattgcaaaacaagggtatcgaagccttgcaaacgtaactgactcatcagcccctgccactgggtatcggtaacctgactatctcggttttgtggttgccagataatacctttcatcgcaaaggaaaaagggctgaccaaaagctgtgtcagcaatacgaaaatgaacttacgcatttaccagtgcactccaatggtgagaaacgcgttgttgcgctctccgttacgttgattaatcgccttaaaggtatgttgatactcgacgccgagactgactttgtgcggccaggcgtcgtagtgcgtctcgccggtccagatattccagcggaccccgactccgccaagctgcgcgccctgagtgcctttatcacgatagccgttgtcctgaacgtgagcgtaaggctcaatagtctgtccgttagctaccttctgatgccagctgacgcgataatctgccgtccacgcctgaatatcctggcggatatattgcgccgcatcgaggtacaggttttgggcaaaccagcctgaaccgttcgggtgccattcgtcgctgtatttgccgccattaaagaatgaggcgctggcgcgcagcatggtatcggatgcgccattttggccgttcagcggcaactgctgttcgacggcgatgaaaaagatctgatcgcgcagcggcttccagcgcagaccggtgccggacatcggatttttcaccggcatcatcaccccgttttctccggtatcggcaaagacgcggctataaactgagagcaggtcgccttccagcagcatattgcgtccgatgcggtactcggcttccagttgtccgtagctacgatagcttttccctggcgctgcgccgccgacattattgttagcggtactcattgcgccggaacgcaagccgatggaagaatcgaaactgaacgtccagcggcgaccgacctcctcatgcaaacggcggaaattgaagcgttgttgattttgttctggggtcagtggggttatcagcgcctgattatcaatgtcatcaatcaccagccgggcgtagtgctgcgtcgcaggcatgtcatccagacgctggttcacgtaggccagttgtcggatcagtgccggatcgtccggaagccctttatgcgccggttcgagcatttcccgcgactgtgcgatatcaccgctatcccacaaggcgtaaccaagcgctgcctgggtgttgctattattcggttccagttccagcgcggcgcgcaaatcactcaccgcggccgggacattatgacgttggcgataaattgtcgcccgcgcaacgtaagcgttggcagaaggcgcaatattgattgagcgcgtgagatcgttcagtgcgagttccggctgaccaggaatgtaacgttgcgcatgcagccaccagtagagggcattgcttcccagtccacgtttttctgcctgttgtagccagcgatcgcgagccgcaccatttcctgccgcctgggcggtattggcagcagcaagcagatcctcattgctcatgtcgtgaagactgattttctgccaggccgccagtgcggtggcgtagtcctcaacctgatacgcctgataggctaccgcacgatgttgccaggcgctcggttgtcgttgttcggcctgaagccatgcatacaacgccacaccgggtagcgtgtcccgataacactttgccagacggttccaggcggcggcatcgtaggaaggcgacatatcgcccagcaagcgaactattgccgggcaattatctgcaatacccggcaactgactttgccactgacgttgctccgccagcggtaagggtttcgataaaatcgccaccttcgccggcgttgccaggtaaggatgactttccagcagagacgccagtcgcgccattaaagtctggctgacacgcgcatcgccctggaaaggatagcgttgcagcaataaatcggcagcttcgcgtgactgctcgttctgcatcagttgccaggttagttgatccaggcgggtaagatttgccggttcttgctgatacagcaatcgtgccagacgcagagcttcagccttgttacgggtcgccacgctgacagcataacgctcctcaagcatttcattggcggggagggtggcgagcagtttttgcgctgcgtcgtactgaccttcttttaacagcaccggtagcgtcgcgccaacaacatactggcggttgtcggcaaactgtaccgtataattcgccaacgcctgaacggggttagcgctgtatttagataacagatagagccaacttttctcttgtgcgtccgtggtaaatagtggcttattttcaatgagataatgctggaggcgtgctttttcgccacgataagccagcgcggtcgcgtaagtaatatatgactgaggatcggtgaagatcccctgtgattgcagtgccaggatccgatcgtccagctgcccggcaagaagcacgtcaaaccactgacggcgttctgccgcgcttaatgtgttctgctggcgtgcttcattgtatagcgtatctgcctgggaccattgtttcaggtagattgcccgttgcagcagatcggttcgcagcgtttttccttccggcgatgcagcaaacgtcgcatcgttcagttgcgctctggcgacaggtaactgtgccagccgcagggcattctgcccgacttcactgcgacaacgcagggtcggcgcagcatcgcacgctttttgctgggcaagcagttcttcaactgtcgtaacgcttttcacttcaaccggaatagccgccagactgcgctcaagtcgggcatctcctgggtgacgtttcagttgatcctcaagcaacagccgcgcccggtcatcatgaccaaaatggcgataggcttccgcaaggtataaagtcagcggaatattatccggcacctgctggtgtatatattcaaattcgcggatggcggttgcttcgtcgttatttttctgtgccttcagcgctttatcgagacggggataaataacaaaatggcgataatcgctcagccccagctcttctgcgctggtgccgatattgtctgcgagtgcgctggtactcaataaagacgtcagcagtaaaccagaccatccgatgacgcgattaaggttattctccttcattttcggactccagttgcgcaacctgttctgtgtttaaacctgctttgagtaatagtgattgcatcgaaacttgtaattcgcgttgaattgtcaggacgcgatccaacgtttcctggctgataacgccttcggtgaccaaaaacttgccgagcggcagagaactgcgttcatggcgcaataacaacacgttaattgctgaacgattaatatgaccgagcgtggtcagtatttcggcgaacaggaactgatgcggcacatattgccgccagatttcaccggcctgctgttccgtgagccactgatgctgaaccgcattgtacaacattgcccgcggatcgtgaccgcgtcggcgtgcataccagtgacgtaaccctgtgacaatttgtccccgcagaacaatgacgtaacgcactttgcgtccgactttacgcgtcagggccgccagcgaaaccgggtcaataccatcttcactgccgacaattaactcgtcattttccagacgcagcggcagtaccgcataatgcagcgccacggaggccggcatttcggcaatcagcgaggaagggatctgccaggcatcgatggattcccacgccacgccgttttgctctgccagcgcctgtgccagctgctcggcgctaatcagcccctgcatcagcattgaaccgcccaggcgtagaccttcgacgcgattacgcagtgctgtatcgagttgttcttcagtgatgacctgattttccagcagaatttgacctaacgggcgcaacgagcgggtatcgccagtcacgctggggaagtcatgcgttgttttatcccacgccacgcgacgtggatcgccgtgttgaagtacctgttttagcgcgcgccagttggccatgaagttaatcaggttgccccagaaaagacgcaggacggaaagcagcccctgcgtcaggccgtagtagccagtaacgaaaatcacccgctgcacgatgcggttaaccatcaaaccaaagtttagccacagcagggtcattaaccatgcgctgccgctgaaaatagaaaggaaatgccaggcatcgggccacaaactttcatacgccagcaacagcaaaagctggatcatcaccagcatcgcgaggaagctgacaaagttactgattgcccctttgcggtcgcgccagagaaagtagttcagcgtcaggctggaggtccatttatgggttttaaagccttggaaaacaatgccgatgatccagcgggatttttgtcgaaccgcagtcgaaaaggtatcggggaaatattcgcgcacgcagatcatgtttgatgtccgcgcgtgctgtaaaaatttacgctgctcgcgttctttggcttcgtccaccaccggaaaacggacaaaaatttccgtcatacctttttctttcaggcggaagccaatgtcgtaatcttcagtaagactctgcacgtcgaaagcaataccgtcaccgtcagctaacagtgcggtcacggcgcggcggctgaaacaggtgccgacgcctgcgctgggcacttgtccggcgagggcttcacgcaccggaacatctttgccatgcagctctgaaaactcatcaatgtaagtcatgctggtgaagtgcgtccattcgcgttcgaacggatacaccgggatctgaatcagatctttacgctcgaccagatagttgaacagacgcaattccatcggtgaaatcacatcttcggcgtcatgcagaataaaaccagcaaaagcgaaattggcgctacgctcaaattgggtgatggcgtccagcacgttgttcagacagtcggctttgctggtggggccaggacgcgcgcagactaccttatgcacattcgggaagcgagcgcacacttcgtcaacatcacgctgagtatcgggggcgttggggtaggtgccaacaaagatatgatagttttcgtagtcgagcgtggtcgccgccagctcggccatattgccgatgacgcccgtttcattccacgccggaaccataatcgctaacggtttttcatctggtttatacagttcgcggtaactcattcgcgggtagcggcgataaacactcaacttgcgtttaatgcggcgtacccagtagacgacatcaataaaaaaatcgtccagcccgctgatgaacatgatgaccgctaacgttatcgcgattacttttaagccgtagagccaggtagcaaaaacatcaagaagccagtccacacaaaaaccttacattaacgctggttatgtttagggtggcgtatattaaggttttttatgaattgtgacagctttttaccattaataggtatgactattgcggcacgttatttttacactggttataaaagttgccgtttgctgaaggattaagcgggtaatgtgataacaaaccttgtcccccgcgcatccgacgttaccgcaaccgtgcctttatgcgcgacaacaatcgatttcactatcgccaggccaataccgctaccttcaccttttcgctggcgggaggggtcaacgcgatagaaacggtcaaacaatcgcggtaagtgctcgggcgcaatgggcgtaccggggttttcgacgataacttgcaccaggtgatcgaccgtctgacagcgcactacaattgtctctccggttggcgtataacgcagggcgttcgaaagcaggttgcttagcgcccgacgcagcatcagcggatcgcccgcgacctgacacttgtcgccaacaaaccgcaactccacgccgcgatcttccgctaacgcctcgaaaaaatcgaacactttgccgacttcatccgccaggttgagcattttcttttcggggattagctggttgttatcggcctgagcgagaaacagcatatcgctgaccattttcgccattcgcgtcagctcttcgagattagagtagagcacatcttccagctccttctggctgcgcgactggctgagggcgatttcggtttgcgttatgagattcgtaattggtgtgcgaatttcgtgagcgatatccgctgagaaattggactggcgggtaaagacatcctcaatacgctcgatcatatggttgaacgacagtaccagctgttccagctcaatgggcacggtctgcgggtcaaggcgaacgtcgagatctttcgaggtaatattctggatttgacggctgacgctgcggatcggcgcgtgacctttatgtaccgccaacagcacgataaagacgatcaggatgctgattaccgatgcggtcataataagtttattcatcaaatcatttatgtaatgaagatgaaaatcgatcgaaagcgcgatgtagagcgtataaatcggtttgccgtcaaccagcgggccaaccggtaagttaatcatccgccagttgctgtgttccatatgcccgtgaccgtgccctggcatcataatcgtcgggccggaaaggagatacacctcgccgccccgcgcgtctttatcgggtatggcgtcacgcgtaaactcgcggatatcgggcgcaccgggggagtgatacaccgttttaccctgactatctgccagggaaatcaacacattggaataaccactgacgatatcttccagcgtcattaagcgtcgggcttgcgtttcgtcagggtgatttagtacccgttcaagggtggcgctaatctcttttaaatcattaatatcctgctcggcaaaatgcacttttactgagtggatcatgatccatgcaaaggcgaaaaacgccgcgatggtggccaggctgataaaaaaggtcaggcgggttgccagcgaaaacgggcgctgaaatggcttactgaccatccggcacctcaagcatgtaacccacgccgcgcacggtttgaatcagcttcggctcaaagtcgttgtcgattttgccgcgtagccgcttcaccgccacatcaatggcgttagtgtcgctgtcgaaattcatgtcccatacctgcgaggcgataagcgagcggggcagcacttcgccctgatggcgaaggaaaaactccagcagagtaaattctttactggtcagagtgatgcgcgtgccgctgcgggtgactttgcggctgacgagatcgaccatcagatcggcaacctgaaactgactttcgataatcaccgccgccccgcgccgcaggagagtgcgcacccgcgccagcagttcagcaaaagcgaacggcttcaccagatagtcatcggcccccaactccagccccttgacgcgatgttcaatggtgccaagcgcggtaagcaacagaatcggcatccctttattggcggagcgcaacatgcgcacgatatcccagccgtttacgtccggcagcataatatcgaggattatcaggtcataatctccggtcatcgccagatggtagccattcagcccgttgtcggccaaatcgaccacaaaaccggcttcggttaaccctttggtcaagtattctccggttttcttttcatcttcgacaatcagcagtttcatatttcctccacatgttgcccgggcaattctagagtagcgggatcagatggcaatcgcttattggcaaaatgacaattttgtcattttcctgtcaccggaaaatcagaggctggcgagtaaagttggcggcataaaatcaccagaaattatgagcctatgtctccttgtaaacttctgccattttgtgtggcccttgcgctaaccggttgttcactggcaccggattatcagcgcccggcaatgcccgtaccgcagcagttctcactcagccagaacggcctcgttaacgcagcagataactatcagaacgcgggctggcgcaccttttttgttgataatcaggtgaagacgctgattagcgaggcgctggtgaataaccgggatttgcgcatggcgacgctgaaagtgcaggaggcacgggcgcaatatcgtctgactgatgccgaccgctacccacagctcaatggcgagggcagcggcagctggagcggtaatcttaaagggaataccgccacgacacgggagttttcgaccggccttaacgccagccttgacctcgattttttcggtcgcttaaagaacatgagcgaagccgagcgacaaaattatttagccactgaggaagctcagcgcgcggtgcatattctgctggtttctaatgtcgcgcaaagctatttcaatcagcaactggcgtatgcgcaattgcaaatagccgaagaaacgctgcgtaattatcagcagtcatatgcgtttgtcgaaaaacaactgttgaccggtagcagcaatgttctggcgctggaacaggctcgcggggtgatagaaagtacccgcagtgacatcgctaaacgtcagggggaactggcgcaggcgaataatgcattgcaactgttattgggaagctacggcaagctgccgcaagcgcagacagtaaacagcgacagtctgcaaagcgttaaattaccggcgggcttgtcgtcgcaaatcttattgcagcgcccggatattatggaagctgaacacgcgttaatggcggctaatgccaatattggtgctgcgcgtgcggcatttttcccgtctatcagcctgaccagcggaatatcgaccgccagcagcgatctgtcgtcattatttaacgccagcagcgggatgtggaattttatacccaaaattgagatccccatttttaatgccggacgcaaccaggccaatctggatatcgccgaaattcgccagcagcagtcggtagtgaattatgaacagaaaatccagaacgcctttaaagaagtggcagatgcgctggcattacgtcaaagcctgaacgatcaaatcagcgcccagcagcgttatctggcgtcgctgcaaattactttgcaacgggcgcgggcattatatcagcacggcgcggtaagttatctggaagtgctggatgccgagcgttctttatttgcaacccgacaaaccttacttgacctgaattatgcccgtcaggtcaacgaaatttctttatataccgcacttggtggcggttggcagtagtaatttttaactccaggagagaataaatgaaaaaagcactgcaagtcgcaatgttcagtctgtttaccgttattggctttaatgcccaggctaacgaacatcatcatgaaaccatgagcgaagtacaaccgcaggttattagcgccactggcgtggtaaaaggtgttgatctggaaagcaaaaaaatcaccatccatcacgatccgattgctgccgtgaactggccggagatgaccatgcgctttaccatcaccccgcagacgaaaatgagtgaaattaaaaccggcgacaaagtggcgtttaattttgtccagcagggcaacctttctttattacaggatattaaagtcagccagtaacccaggtttaatgatatgaaaaaaatcgcgcttattatcggcagcatgatcgcgggcggtattatttctgcggcaggttttaactggtttgcaaaggctgaaccgcccgcagaaaaaacgtcgaccgcagaacgtaaagtcttattctggtacgaccctatgtatcccaatacgcggttcgataaaccaggtaaatcgccgtttatggatatggatctggtgccgaaatatgccgatgaagagagttctgcgtctggtgtgcgcattgacccgactcagacgcagaatctgggggtgaaaacggctaccgtcacgcgcgggccgctgacttttgcccagagtttcccggcgaatgtcagttacaacgagtatcagtatgccattgtgcaggctcgcgctgccgggtttatcgacaaggtgtatccgcttaccgtgggcgataaagtgcaaaagggcacaccgcttctcgacctgaccattcccgactgggtggaagcgcagagtgagtatttactgctgcgcgaaaccggcggtacggcgacccagactgaaggcattcttgagcggctgcgactggcgggaatgccggaggcggatattcgccgcctgatcgccacgcaaaaaatccagactcgctttacgctcaaagcgcccattgatggcgtgatcaccgcgtttgatctgcgcgcgggaatgaatatcgccaaagataacgtggtcgcgaaaattcagggtatggacccggtgtgggtcactgctgcgatcccggagtccatcgcctggctggtgaaagatgcctcgcagtttacgctcaccgttccggcgcgacctgataaaacactcaccatccgcaaatggaccctgctacccggcgtggatgccgcgacccgcacgctacaactgcgtctggaagtcgacaacgccgacgaggcgctaaaaccaggcatgaacgcctggttgcaactcaataccgccagcgaaccgatgctgctcattccgtcacaggcgctgattgataccggcaacgaacagcgggtgattaccgttgatgccgacgggcgctttgtaccgaaacgcgttgccgttttccaggcatcgcaaggtgtcaccgcattacgctctggtctggcggaaggtgaaaaggtggtttccagcggcctgttcctgattgattccgaagccaatatttctggcgcactggagcggatgcgctctgaaagtgctacccatgcgcattgagggaataaccaatgattgaatggattattcgtcgctcggtggcgaaccgttttctggtgctgatgggcgcgttatttctgagtatctggggcacctggaccatcattaacacgccagtggatgcgctgccggatctctccgatgtgcaggtgattattaaaaccagctatcccggccaggcaccgcaaatcgttgaaaatcaggtgacttatccgctaaccaccaccatgttgtcggtgcctggcgcgaagactgtgcgtggtttctcgcagtttggcgactcttatgtgtatgtcattttcgaagatggtaccgatccgtactgggcgcgttcgcgggtgctggaatacctcaaccaggtacagggtaagctgcctgcgggagtcagcgccgagctggggccagatgccacgggtgttggctggatctatgaatatgcactggtggatcgcagcggtaagcacgatctggccgatttacgctcattgcaggactggtttctcaaatatgagctaaaaaccatccctgacgttgcggaagtggcgtcggtgggcggtgtggtgaaagagtatcaggtggttatcgattctcagcgcctggcacagtatggcatcagtctagccgaagtaaaaagcgcgctggatgcttcaaaccaggaagcgggcggttcgtcgatcgaactggcggaagcggaatatatggtgcgcgccagcggctatctgcaaacgctcgacgactttaatcacatcgttttaaaagccagtgaaaatggcgtgcctgtttatctgcgtgatgttgcgaaggtccagattggaccggaaatgcgccggggcattgccgaactgaacggcgaaggcgaagtggcaggcggggtggtgatcctgcgctccggcaaaaacgcccgtgaagtgatcgccgccgtgaaggacaaactggaaacgctgaaaagtagtctgccggaaggcgtggagatagttacaacatacgatcgcagccagctcattgaccgcgccatcgacaacctcagcggcaagttgctggaagagtttattgtggtggcggtagtctgtgcgctgtttctctggcatgtgcgctcggcgctggtggcgattatttcgttgccgctggggttgtgtattgcttttattgtcatgcacttccagggactgaatgccaatattatgtcgttgggtggcattgcgattgccgtcggggcgatggtcgatgctgctatcgtcatgatcgagaatgcgcataaacggctggaagagtggcagcaccagcatcctgacgccacgctggataataaaacgcgctggcaggtgatcaccgatgcgtctgttgaagtgggtccggcgttgtttatcagtctgctgattatcacgttgtcgtttatcccgatcttcaccctggaagggcaggaagggcgtctgtttggcccgctggcgttcactaaaacctatgcgatggcgggcgcggcgctgctggcgatcgtagtgatcccgatcctgatgggctactggatccgtggcaaaattccgccggaaagcagtaacccgctcaatcgctttttgattcgtgtttatcatcctctattgctgaaagtactgcactggccgaaaaccacgctgttggtggcagcgctttcggtgctgacggttctctggccgctcaataaagttggcggggaatttttaccgcagatcaatgaaggcgacttgttgtatatgccatcgacgctgccggggatttccgcagcagaggcggcgagtatgctgcaaaaaaccgacaagctaattatgagcgtacctgaagtggcgcgggtatttggcaaaaccgggaaagcggaaaccgccaccgattctgctccgctggagatggtagaaacgaccatccagcttaagccgcaggagcagtggcggccaggcatgacgatggacaaaatcattgaggaactggataacaccgtgcgtctgccggggctggcgaatctgtgggtgccgccaattcgtaaccgtatcgatatgctctcaaccggcattaaaagccccatcggcattaaagtttccggcactgtgctggcggatatcgacgcgatggcggagcaaattgaagaagtggcacgaacggtgccaggcgtagcttctgcgcttgccgagcggctggaaggtgggcgctatatcaacgttgagattaaccgtgaaaaagccgcacgttacggtatgacggtggcggatgtgcagttgtttgtgacttctgcggtgggcggggcgatggttggcgaaacggtggaagggattgcccgttatccaattaatctgcgttatccgcaaagctggcgcgatagtccgcaggcactgcgccagttgccgatcctgacgccgatgaagcagcaaatcaccctggcagacgtggccgacgttaaagtctctaccggaccgtcgatgctgaaaaccgagaatgcgcgcccgacgagctggatttatatcgatgcccgcgatcgtgacatggtgtcggtggttcacgatttgcaaaaagcgatagctgaaaaagtgcagttaaaaccaggcaccagcgtggcgttttccgggcagttcgagttgctggagcgcgccaaccataagctgaaactcatggtgccgatgacgctgatgatcatcttcgtgctgttgtatctggcgttccgtcgggtgggcgaagcgttgctgattatcagcagcgtaccgtttgcgctggtgggcggcatctggttgctgtggtggatgggctttcatctttccgtggcgacgggcactggctttatcgccctcgccggggtcgccgccgaatttggcgtggtgatgctgatgtatttacgtcacgccatagaggccgagccgtcgttgaataatccgcaaacattcagtgagcagaagctggatgaggcgttgtatcacggcgcggtactgcgcgtgcgcccgaaagcgatgacggtggcggtgattatcgccggtctgctgccgattctgtggggaacgggggctggttcagaggtgatgagccggattgccgcaccgatgattggcggcatgatcaccgcacctttgctgtcgctgtttattatcccggcggcgtataagctgatgtggctgcaccgacatcgggtacggaaataaaagcaggataccccgtttaaccgtgtggattgtgtcttgcgacgatgggcactaaatgttaaaaggtgcccctcaacaaaaaagacacacaggggaaaggcgtgaaaaacgcgtcaaccgtatcggaagatactgcgtcgaatcaagagccgacgcttcatcgcggattacataaccgtcatattcaactgattgcgctgggtggcgcaattggtactggtctgtttcttggcattggtccggcgattcagatggcgggtccggctgtattgctgggctacggcgtcgccgggatcatcgctttcctgattatgcgccagcttggcgagatggtggtcgaagagccggtatccggttcatttgcccactttgcctataaatactggggaccgtttgcgggcttcctctctggctggaactactgggtaatgttcgtgctggtgggaatggcagagctgaccgctgcgggcatctatatgcagtactggttcccggatgttccaacgtggatttgggctgccgccttctttattatcatcaacgccgttaacctggtgaacgtgcgcttatatggcgaaaccgagttctggtttgcgttgattaaagtgctggcaatcatcggtatgatcggctttggcctgtggctgctgttttctggtcacggcggcgagaaagccagtatcgacaacctctggcgctacggtggtttcttcgccaccggctggaatgggctgattttgtcgctggcggtaattatgttctccttcggcggtctggagctgattgggattactgccgctgaagcgcgcgatccggaaaaaagcattccaaaagcggtaaatcaggtggtgtatcgcatcctgctgttttacatcggttcactggtggttttactggcgctctatccgtgggtggaagtgaaatccaacagtagcccgtttgtgatgattttccataatctcgacagcaacgtggtagcttctgcgctgaacttcgtcattctggtagcatcgctgtcagtgtataacagcggggtttactctaacagccgcatgctgtttggcctttctgtgcagggtaatgcgccgaagtttttgactcgcgtcagccgtcgcggtgtgccgattaactcgctgatgctttccggagcgatcacttcgctggtggtgttaatcaactatctgctgccgcaaaaagcgtttggtctgctgatggcgctggtggtagcaacgctgctgttgaactggattatgatctgtctggcgcatctgcgttttcgtgcagcgatgcgacgtcaggggcgtgaaacacagtttaaggcgctgctctatccgttcggcaactatctctgcattgccttcctcggcatgattttgctgctgatgtgcacgatggatgatatgcgcttgtcagcgatcctgctgccggtgtggattgtattcctgtttatggcatttaaaacgctgcgtcggaaataaggcattcacgctacatccgacaaaacgatgtcaaccatccgaaaccgctctcatccattcgatgagagcggtttttttaattactgcttaaatgcacccgccagagagcgaatatcattgccggttggcgactgatgaagtcgcagaccaaactcttcgacaatcgcaaatatgtgatcgaatatatcagcctgaatgctttcatattccagccacaccacggtgttagtaaacgcgtagatctcgagcggtaaaccgttatcacctggagccagttggcgtaccattaaggtcatatctttacgaatccgcggatggttacgcagatattcgttcagataggcacgaaaggttccaatattggtcattcggcgcagatttaataccgactccgtagaaccttgctggcgattccactcattaatttcctgatggcggctggttaaataaggctttaacaaatgcgctttattcagacgttgcatttcgtcttcatcaagaaaacgaatactggtgacatcaatactgatactgcgcttaatacgtcgcccgccagatgctgacatcccgctccagtttttaaaggagtcagaaaccagagaccaggtgggaatagtggtaatggtattgtcccagttacgcactttgacggtggttaacccaatatcgatcaccgcgccatccgcgccgtatttcggcatctccagccagtcgcccagtttcagcatatcgttcgcggaaagctgaatacctgccaccagaccaagaatcggatctttaaataccaacatcagcacggcagccattgcaccaagaccgctgatcagaatcgctggcgactgaccaatcagcagcgagatcatcaaaatgccgaccagaatcgcgccgatcagtttaatcccctgaaatatccctttcagcggtaactgagatgctgccgggaatttctgcgccagattcaaaataacatccagcaacgagaagactgaaagcagcgcatacatcatgatccacaactgcgcgcaggtagtcagaatatctgccgcttcggtgcctttttgcagccagaataccgcctgaatattgacgataatcccctgcagggtaaaagctaaacggtggaagagtttattctgggtaatgatttgcaaccaaagccgtgaactggcgatggcacgtttttcgaaggtccgcagtaccacccaatgcaaaataatatgcaccacgacggcggtcagaaaaataataccgaaaatcatcaccatcgaggtggtgtgatcgatctcaatacccgctaaatcttcaacctgggatattaaatcctgcataacgtctcctttatacaacagcagcctatgatgacggctgaaacagggttatgcaaatcaggagaatctgagaggaaatagccgggcagatgcccggcaagagagaattacacttcggttaaggtgatgttttgcggcagacgagatttcggcagcgtagcgttaaaatcttcaacgctgtgatgacctaccggaacaaccaccagactggtgtagcctttctctttcagaccaaattctgcatcgaggatggcggcgtcaaaaccttcgatgggtaccgcgtccagacccagagccgccacgccgagcaggaagttaccgacgttgagataaacctgttttgccatccactctgcatcatcatgcagatctttacggtgcatatcagcgaagaacttgcgacctttatcgttcgcggctttcgcttccggcgtggcaaagcggccatcggcatcttcctggtcaacaaccagcttcagccagacatcgtccatcgcggtttttgcacagaacaccacgacgtgcgaggcatcaagcattttacgctcgttgaacacgtaattaccggcagcggatttggcaacacgcgctttaccttcttccgtgctggcaacaataaaatgccacggctgggagttggtgctggatgggctgtattgcagtagcgttttgatctgctcggcctgttccggggtaagttttttgctggcatcaaatgccttagtggaatgacgctttaaggcgacagaaatgatatccataaagactccatgtgaaagtaattttgcgtgccagcagattacaaggttcaacgagaaatggtaagcgagaaaaatgcgctatagatttccgctttagcctggacgcactcttttttgatcgcgtttagccagaccatcaaccaccagattccacgaatcgttgatcagatcgcgaagtaacgcttcggagatttcttcgccgggatacactgaaatccagtgctttttattcatgtgataccctggcttaatgcttgggtatatttgctgatttaacagggatttttgtggatcggacttcagattgataaaggggacgccgcgtagctccgacgacagcataaaaatcttgccgccaattttaaaaacatcgaactccgggccaaaaggccagcaaagctcgacaaagggtaactcaagggccaggcgtttcgccgtttcgtgcagtgattgcttatccataaacgttcctttaggcgaaggagaataagcaaagtatgccgcgaagtacggcgataatcgacgtttaatccgccagcgagaaccagcgtcgccagataaagcgcagaacaaaatactcaatagcgcccagcactaaaaaccacagacaaaacaataaagtgtaaagctgactaagatccatcagatggaacatggtcaccagtttttgtgccagcgccagccccagtgcgggggcgggcagcagcaggcaagagaggaaagccatcagcaaaatgcctgctgcggtggtcaaggtttctaaagggtgtttcataacattgttaaatgtaagttaaaacaccattgtcagggatattcttctgtaaggcaattcccggcttagtcaccggcccagatctcacaatgctttttcaccagcccaatcagcgagccgccatcggcgacgaaatcgcgcattagctgcgcttcattcagaccgctgacgacctggcgatgcagggcctcaatcgcgctcgatgcaccaattttatgtgcggaaggggcgattttttccagcaatcgcaaggtatcttccgttagcggtcgacgatctccagtgtgcggatcggtgatgacgccttcaagcccatagcgacaggcctggaaacggttgaatttatacagcaggtaatctttttcctgatgtttaaacgggcgttccgtcagtaaccagtgggcggtagcctgaattaatcccgccatatttactgcgtggctaagggttaacggggtatccatcacccgaacctccaccgtgccaaaatgaggactggggcgaatatcccagtgcagatctttaatgctgtcgatcatcgtggtgtaactcagacagcgaaacagggcttcaaattgttgccagttactgacccacggcatcgggccattatcaggaaaggcggaaaaaatattcggtcgtgaggaggcaaaacgcgtatccgttccctgcatatatggcgacgcggcggaaagggcgataaagtgcggcacaaatcgtgacaagccgtgcagcaaataaatggcgtcatcgccactggcgcagccaacatggacatgctgaccaaaaacggtcgcctgctgaatgagataaccaaagttttccagcgtgcgttgatagcgttcgttatcgcatacctcctgacgctgccatttctgaaacgggtgcgtgccaccgccgcaaatttccagatgatggtctgtggctgcctgcaatacgactttctgcatcgctgaaaactgcccggcagcctggttgatatcacggcaaacatccgtcgccagctccagcatactttcggtgatatcgtgctttacctctccggccgtgatcttatttttaaccgcgtcaatcagcattgaagagtcctggcttaagtcatagcccggcggattaaccacctgcatttccagttcaataccgagggtaaaaggttcagaaacatgaaaatcgggtaatggcataggtttctcttatgttggcgttttctattcagtatagaagtcggagcggctgggcgagatgcggaagttctggaatgtttctttttttggtgatggtgaactgatggtgcctgaagcaatttggctacttttgcaatgtgacaagttatggcagtgctgactggtggcgaagaattttgacgattgagtcatgcagaaaaaaacgggttcagcttcagttgattaaatgaggagtgagaagtccgaaacaggactcactgtataaataaacagctattttgttgaggaagggtaagataacggcgggtgcctgaagctttccggtttcaggtttactctgaggtctggaaagatgaagccccaggagatatttctatcaaccctggggctgccactccaaacccgaacaatttggatggtagtcccttcttcgcatggaggcaatataaacatgctgacgaaatatgcccttgcggcagtcatagtgctgtgtttaacggtgctgggatttacgcttctggtcggagactcgctgtgtgagtttacggtgaaggaacgtaatattgagtttaaggctgttctcgcttacgaaccgaagaagtagccgttgtgcggggagtaatcccataagcgctaacttaagggttgtggtattacgcctgatatgatttaacgtgccgatgaattactctcacgataactggtcagcaattctggcccatattggtaagcccgaagaactggatacttcggcacgtaatgccggggctctaacccgccgccgcgaaattcgtgatgctgcaactctgctacgtctggggctggcttacggccccggggggatgtcattacgtgaagtcactgcatgggctcagctccatgacgttgcaacattatctgacgtggctctcctgaagcggctgcggaatgccgccgactggtttggcatacttgccgcacaaacacttgctgtacgcgccgcagttacgggttgtacaagcggaaagagattgcgtcttgtcgatggaacagcaatcagtgcgcccggggcggcagcgctgaatggcgactacatatgggatatgatcctcatacctgtcagttcactgattttgagctaaccgacagcagagacgctgaacggctggaccgatttgcgcaaacggcagacgagatacgcattgctgaccggggattcggttcgcgtcccgaatgtatccgctcacttgcttttggagaagctgattatatcgtccgggttcactggcgaggattgcgctggttaactgcagaaggaatgcgctttgacatgatgggttttctgcgcgggctggattgcggtaagaacggtgaaaccactgtaatgataggcaattcaggtaataaaaaagccggagctccctttccggcacgtctcattgccgtatcacttcctcccgaaaaagcattaatcagtaaaacccgactgctcagcgagaatcgtcgaaaaggacgagtagttcaggcggaaacgctggaagcagcgggccatgtgctattgctaacatcattaccggaagatgaatattcagcagagcaagtggctgattgttaccgtctgcgatggcaaattgaactggcttttaagcggctcaaaagtttgctgcacctggatgctttgcgtgcaaaggaacctgaactcgcgaaagcgtggatatttgctaatctactcgccgcatttttaattgacgacataatccagccatcgctggatttcccccccagaagtgccggatccgaaaagaagaactaactcgttgtggagaataacaaaaatggtcatctggagcttacaggtggccattcgtgggacagtatccctgacagcctacaaaacgcaattgaagaacgcgaggcatcgtcttaacgaggcaccgaggcgtcgcattcttcagatggttcaacccttaagttagcgcttatgggagtaatccccgcatatccggttgtcaggtcaggatggtaaggcacctgctttacactttcgcccgtggtcagtgatggctgcgggcgaatcgtaccagatgttgtcaattaatcgtgttggcacagcgttatgactatcttttcttttatctgccagtgcacagcaaacatctcattctcacgatgaatgatgacctgctgtttattccagctaattatctgatagtccagaaaacctgcatcagtttggatctcacttgccttaaatgcgctctctttggcggaaaatgccagtgtcagcgccagagaaaaggctaaaccgcagtctgcgagtcgctcgtgttccgctggtgtaataatgttgtctgtcaattctcttgcggtttgtacagaaaaaatttcttctatatcaatgccaatcggttgacgagataccacggctaatgccgtagtcccacagtggctaatactgccgtatacctccgcaggccagacaggttggcgtagctcgccgattgcgggcacacatttatagccatattcccgcaaagcataaacagcagcgatccgtccggctaaatgctctgttttacgtttacgtccagcgtgttgcagttgtgcgtagtgcggcagccagagtaaatcctgctcacaaaaattcgccggatcgaactcaacaaaatgcagcgtatgtccggcaaaggggagggaggtatgcgtagttttcatatcgaccatattcgagactgatgacaaacgcaaaactgcctgatgcgctacgcttatcaggcctacatggtcctgcaatatattgaattggcaagatttttgtaggccggataaggcgttcacgccgcatccggcatgaacgacgcgcactttgtcaacaatctgacgttagcatcagaagtgggtgtttacgctcatataccacgtacgtcccggctcgttataggtatacgccccggcaccggcgatatagttggcccctgccaaatcgcccgtggtctgggcattacccgcacgccacaaacgtttgtcgaacagattgtccacgccgccggtcagactgacattcttcgtcacatcccaggtcgcgctcaggccaacaatgctgtaaggactaatttctttggtttccggtccaaccgctggctgacctttatagttgtacttcttcggctgctgcttgccgtaccaggtgaaggtcgtttgcatcgacaaatcttcccgtgcctgccagctcagcgttgagttcaacgtatactccgggatgatcgacaaacggtcgcccgtggttttgttttcactcttcagcatataagtgatgttattggtccacatcaccgtttcgctaaccggtacgtttaacgatccttccagaccttcaaccaccgctttcggcacgttatcccactgatagagatcggtgccgactgcgttttgccctacagccacatagcccgcttcaatcttattgcgataatcgttacggaaccaggtgacgcccgccagccacccgtcgcgtttgaactccagaccaatctctttgttgatgctggtttctgctttcaggtcatcgttaccttgcagatagcagccgcccgcgctggcatagcaaccctgacctttactgtagagaatgtagttcgggttagtctggtacaggctcggcgctttataagcacgggcgatgcccattttcagcgtgaagtcatcgcctaaaccttgcgatatgttcagcgccgggctccagttattgccgacaatactgtgatgatcgaaacgcagccccagcgttacgatggtgctgtcagtcagctccatgttgttttcggcaaacagcgagaaaatttctgcttttgaatacgggctacggtcggtggtactcacgccatcaatagcgccaccggtattcgttccggtcagtgcctgggtgttggaacttaagtccttcatccgttgctgattccactccgtacccagcgtcagcgtctggttaacgaggaaatcaatcggcaggttaacttcgctgtgcagcatcacgtcatcaagatcgatatcgacgaaatcctgtgtcgctttttcgttaaatttcccttcggtaccgcccgccagaccttccggaatacgcgagttacgggtgtgttcgtactgcacccagttgctggtggtcacgccgttatcccagccaccgttccaggtcagcgcgtagttctggcgatacagacggttggtttcatcgccatatttcgagcgggtataggaatcggagttggtattctgggtgtcgcccgcatacaggttaccctggcggctgtaacctgcttccagttccagcgattgcaatggcgcgaaatcccagcgcaccacgccattaatatctttgttgattaccccttcgcgcccggctggtaacgtcgtggcatacgttccggcacgcgcggactgatggccctggttgatatcccacgcgtcagcctgggttttgtcgaggttgccatacaaacggaagctgaattcgtcgcccagcggaccggtcaggctaaagttagtgcgtttggtggcaccttcctctttatgttctggcgcattgaaatatgcgtcccaggagccgtgccactcgccgctgccttttttggtaatgatgttaaccacgccgcccgccgcgccgttgccataacgcgcagctgccggaccacgcagaacttcaatacgttcaatcatttcaggtggcacccaggaagtatcaccacgggtatcgcgctcgccacgccagccctgacgcaccgagttacggctgcttaccggcttgccgtcaatcaaaatcagcgtgttttccggacccataccgcgaatatcaatctgtcggttattcccacgctgaccactggtggagttaccggtcaggttaacgcctggcatggtacggatgatctccgacacatcgcgggcaaccgggtttttgcggatttcatctgcggtgatggtcgaaacgccaggcgcctgtaagttctgctcggcggcggtaacgacaatagtatcgtcatgtgaaacaggagtatcggtcggctcttgtgcctgcgctaccccataaatccccagattgaccaacaaggccagggaatgaatcttcttgttcattgttttattcctgcatttttgccacgaattgcaactgtcgggcatggtcgtcatcaacacgacgcatcccgctaccgcgaaaacctttgatcctgaaagacacgcagtgcagttggttaattaatgtccgcgcttcccacggcgcgccattacgctattgcaaatgcaaatagttatcaataatattatcaatatatttctgcaatcaatgaaaaattgcacagtaaacatggggttatggtgtgacggcgttaaaagtaggaagtgagagctggtggcagtcgaaacatggcccggaatggcagcgtctgaatgacgaaatgtttgaggtcactttctggtggcgtgatccccaaggttctgaagaatactcgacgataaagcgcgtatgggtctacatcactggtgtgaccgatcaccatcagaacagccagccccagtcgatgcagcgaattgcaggcactaacgtctggcagtggacgacacaactcaatgccaactggcgcggcagctactgctttattcccaccgaacgcgatgacattttttctgtaccatcccccgatcgcctcgaattgcgcgaaggctggcgaaaactattaccccaggcgatagccgatccgctgaacctacaaagctggaaaggcgggcgagggcacgctgtttctgcactcgaaatgccgcaagcgcctctgcaaccgggatgggattgtccgcaagcgccagaaatacctgccaaagaaattatctggaaaagtgaacggttgaaaaagtcacggcgtgtatggatttttaccaccggcgatgcaacagcagaagaacgcccgctggcagttttgctcgatggcgaattttgggcgcaaagtatgcccgtctggccagtgctgacttcgctgacccatcgtcagcaacttcctcccgccgtgtatgtgttgatcgacgctatcgacaccacgcaccgcgcccacgaactgccgtgtaatgcggatttctggctcgcagtacagcaagagttattacccctggtgaaagctattgccccttttagcgatcgtgccgatcgcaccgtggttgccgggcagagttttggtgggctttccgcgctgtatgccggactgcactggcctgaacgctttggctgtgtattaagccagtcaggatcgtactggtggccgcatcggggcgggcagcaagagggcgtgttacttgaaaagctaaaagctggtgaagttagcgccgaaggtctgcgcattgtgctggaagcgggtattcgcgagccgatgatcatgcgggccaatcaggcgctgtatgcgcaattacaccccataaaagaatccattttctggcgtcaggttgacggcggacatgatgcgctttgttggcgcggtggcttgatgcaggggctaatcgacctctggcaaccacttttccatgacaggagttgaatatggcattcagtaatcccttcgatgatccgcagggagcgttttacatattgcgcaatgcgcaggggcaattcagtctgtggccgcaacaatgcgtcttaccggcaggctgggacattgtgtgtcagccgcagtcacaggcgtcctgccagcagtggctggaagcccactggcgtactctgacaccgacgaattttacccagttgcaggaggcacaatgagccagcatttacctttggtcgccgcacagcccggcatctggatggcagaaaaactgtcagaattaccctccgcctggagcgtggcgcattacgttgagttaaccggagaggttgattcgccattactggcccgcgcggtggttgccggactagcgcaagcagatacgctgcggatgcgttttacggaagataacggcgaagtctggcagtgggtcgatgatgcgctgacgttcgaactgccagaaattatcgacctacgaaccaacattgatccgcacggtactgcgcaggcattaatgcaggcggatttgcaacaagatctgcgcgtcgatagcggtaaaccactggtctttcatcagctgatacaggtggcggataaccgctggtactggtatcagcgttatcaccatttgctggtcgatggctttagtttcccggccattacccgccagatcgccaatatttactgcacatggctgcgtggcgaaccaacgcctgcttcgccatttacgcctttcgctgatgtagtggaagagtaccagcaataccgcgaaagcgaagcctggcagcgtgatgcggcattctgggcagaacagcgtcgtcaactgccgccgcccgcgtcactttctccggcacctttaccggggcgcagcgcctcggcagatattctgcgcctgaaactggaatttaccgacggggaattccgccagctggctacgcaactttcaggtgtgcagcgtaccgatttagcccttgcgctggcagccttgtggctggggcgattgtgcaatcgtatggactacgccgccggatttatctttatgcgtcgactgggctcggcggcgctgacggctaccggacccgtgctcaacgttttgccgttgggtattcacattgcggcgcaagaaacgctgccggaactggcaacccgactggcagcacaactgaaaaaaatgcgtcgtcatcaacgttacgatgccgaacaaattgtccgtgacagcgggcgagcggcaggtgatgaaccgctgtttggtccggtactcaatatcaaggtatttgattaccaactggatattcctgatgttcaggcgcaaacccataccctggcaaccggtccggttaatgaccttgaactggccctgttcccggatgtacacggtgatttgagtattgagatcctcgccaataaacagcgttacgatgagccaacgttaatccagcatgctgaacgcctgaaaatgctgattgcccagttcgccgcggatccggcgctgttgtgcggcgatgtcgatattatgctgccaggtgagtatgcgcagctggcgcagctcaacgccactcaggttgagattccagaaaccacgcttagcgcgctggtggcagaacaagcggcaaaaacaccggatgctccggcgctggcagatgcgcgttacctgttcagctatcgggaaatgcgcgagcaggtggtggcgctggcgaatctgctgcgtgagcgcggcgttaaaccaggggacagcgtggcggtggcactaccgcgctcggtctttttgaccctggcactccatgcgatagttgaagctggagcggcctggctaccgctggataccggctatccggacgatcgcctgaaaatgatgctggaagatgcgcgtccgtcgctgttaattaccaccgacgatcaactgccgcgctttagcgatgttcccaatttaacaagcctttgctataacgccccgcttacaccgcagggcagtgcgccgctgcaactttcacaaccgcatcacacggcttatatcatctttacctctggctccaccggcaggccgaaaggggtaatggtcgggcagacggctatcgtcaaccgcctgctttggatgcaaaatcattatccgcttacaggcgaagatgtcgttgcccaaaaaacgccgtgcagttttgatgtctcggtgtgggagtttttctggccgtttatcgcaggggcaaaactggtgatggctgaaccggaagcgcaccgcgacccgctcgctatgcagcaattctttgccgaatatggcgtaacgaccacgcactttgtgccgtcgatgctggcggcatttgttgcctcgctgacgccgcaaaccgctcgccagagttgcgcgacgttgaaacaggttttctgtagtggtgaggccttaccggctgatttatgccgcgaatggcaacagttaactggcgcgccgttgcataatctatatggcccgacggaagcggcggtagatgtcagctggtatccggcttttggcgaggaactggcacaggtgcgcggcagcagtgtgccgattggttatccggtatggaatacgggtctgcgtattcttgatgcgatgatgcatccggtgccgccgggtgtggcgggtgatctctatctcactggcattcaactggcgcagggctatctcggacgccccgatctgaccgccagccgctttattgccgatccttttgccccaggtgaacggatgtaccgtaccggagacgttgcccgctggctggataacggcgcggtggagtacctcgggcgcagtgatgatcagctaaaaattcgcgggcagcgtatcgaactgggcgaaatcgatcgcgtgatgcaggcgctgccggatgtcgaacaagccgttacccacgcctgtgtgattaaccaggcggctgccaccggtggtgatgcgcgtcaattggtgggctatctggtgtcgcaatcgggcctgccgttggataccagcgcattgcaggcgcagcttcgtgaaacattgccaccacatatggtaccggtggttctgctgcaacttccacagttaccacttagcgccaacggcaagctggatcgcaaagccttaccgttgcctgaactgaaggcacaagcgccagggcgtgcgccgaaagcgggcagtgaaacgattatcgccgcggcattctcgtcgttgctggggtgtgacgtgcaggatgccgatgctgatttcttcgcgcttggcggtcattcgctactggcaatgaaactggcagcgcagttaagtcggcaggttgcccgccaggtgacgccggggcaagtgatggtcgcgtcaactgtcgccaaactggcaacgattattgatgctgaagaagacagcacccggcgtatgggattcgaaaccattctgccgttgcgtgaaggtaatggcccgacgctgttttgtttccatcctgcgtccggttttgcctggcagttcagcgtgctctcgcgttatctcgatccacaatggtcgattatcggcattcagtcaccgcgccccaatggccccatgcagacggcggcaaacctggatgaagtctgcgaagcgcatctggcaacgttacttgaacaacaaccgcatggcccttattacctgctggggtattcccttggcggtacgctggcgcagggtattgcggcgcgactgcgtgcccgtggcgaacaggtggcatttcttggcttgctggatacctggccgccagaaacgcaaaactggcaggaaaaagaagctaatggtctggacccggaagtgctggcggagattaaccgcgaacgcgaggccttcctggcagcacagcagggaagtacttcaacggagttgtttaccaccattgaaggcaactacgctgatgctgtgcgcctgctgacgactgctcatagcgtaccgtttgacggtaaagcgacgctgtttgttgctgaacgcacacttcaggaaggtatgagtcccgaacgcgcctggtcgccgtggatagcggagctggatatctatcgtcaggattgtgcgcatgtggatattatctctccagggacgtttgaaaaaattgggccgattattcgcgcaacgctaaacaggtaaattaatattatttataaacccataattacagaaaataattatgggttttttatttgtttgatttataggtttgatgaatatttctcttaaatagagtgaatgttgcattcagtggaaggaatttacaaacttcagcttcggataattatcaccaactggtaaagtgagcgccgtggagatttccccctattggactcattttcaggttataccccatgtcatcactgaatattaaacagggaagtgacgctcattttcccgattatcctctggcgtcgcccagtaataatgaaattgatttacttaatctaatctcagttttatggcgggccaaaaaaacggtcatggcggtcgtttttgcgtttgcctgcgcaggcttgctgatctctttcatcctgccgcaaaaatggaccagcgcggcggttgtcacgcctccagaacctgttcagtggcaagagttggagaaatcattcactaagcttcgtgtgctggatctggatatcaaaattgatcgtacagaagcatttaacctgtttatcaagaagtttcagtcggttagcttgctggaagagtacctgcgttcatcaccttatgtgatggaccaattaaaagaggcgaaaatcgacgaactggatttgcatcgcgcaattgtcgcattgagcgaaaaaatgaaagcggttgatgacaatgccagtaagaaaaaagatgaaccgtcactgtatacctcctggacgctaagttttaccgcgccaaccagtgaagaggcgcagaccgttttgagcgggtatatcgattatatctctacgttggtggtgaaagagtcgctagaaaacgtccgtaataaactggagatcaaaacccagtttgaaaaagaaaaactggctcaggatcgcattaaaacgaaaaatcaacttgatgcaaacattcagcgcctcaattattcactcgacattgccaacgcggcaggaattaaaaagcccgtttacagtaatggtcaggccgttaaagatgaccccgatttttctatttctctcggtgcagacggtattgaacgcaaactggaaatagaaaaagcggtcactgacgttgcggaactgaacggtgaattacgtaatcggcagtatcttgtcgagcaattaacaaaagcacatgtcaacgatgtgaattttacgccgtttaaatatcagttaagcccgtcattgccagtgaaaaaagacggtccgggtaaggcgattattgtgatcctttccgcgttgatcggcgggatggtggcttgtggtggcgtgctgttgcgctatgcgatggcatccagaaaacaggatgccatgatggcagaccacttagtttaactatttgcggttgaaggtgccgttcgtccgagcggcaccacaagcggcgttccggcaactggatcgtcaatgatcatgcagcgcagaccataaatgcgctcaatcagttcagcagtgacaatctccttcggcgctccctgagcaacaattttcccttcccgcaatgcaatcaaatggctggcgtaacgacaggcctgattaagatcgtgcagcaccgccgccagggtatagcctttttcgcggttcagttcgcttaacaactccagcaaatcaatctgatgactgatatccagccaggtcgtgggttcgtcgagcagcataattgccgtttcctgggccagcaccatcgcgatccacgctcgctggcgttgtccgccagaaagggtatccacgctttgatctgccagatgagttattcccgtggcctgcattgctttcgttaccgcttcttcatcctctttgcgccagcgggtaaacagcggttgatgcggataacgtccacgcgccaccagctcctgcacggtgatatcgcccggcgtggtagcattttgcgccaacagaccaatccggcgtgcaacctctttactggcgtaatgttgaatgtgctcgccatccagccagacatgcccatgagcaggcgtcatcaggcggcttaaggtacgcagtaacgtggatttaccgcagccatttggcccgataattgccgtgaagtgaccatcaggtatttctacagtcagattttccgcaacggtatatttgccatatcccagggttaactgttcgccgcgcaaacgggctactgattcggtcattttttgcgagactcctgaattaacaagacgataaggtaaataccgccgaggctgacggtaacgacgccaaccggaagttgatacggcataaacagttgttgggcgcagagatcggccgccagcagtaacagcgccccgcatagcgccgcctgggttagcccccagcgagcggtgccgctaatgcgtcgggcaatgtgcggtgcgactaaagcaataaaggaaatcggcccggcaagcgctgttgccgcagcggtaagcaccactgcaaccagcatcattaacagacgcgaacgttcgacgctgacgcccagcgcacacgcggtatcatcgcccatttccagcaagcgcatccggcgtaccagtaaggcggcggcaatgagcatcaatataatgatgggtgcggaaggcgaggtttttgcccacgtcaggccgttgagcgatccggcattccacaaacctgctgttagcgccgtttctaaagacgctttcagcaacagccaggtattaaaggccaccagcatggcgcgaacgccgataccgataataatcaaccgaaaggtgtcgatgccgttgcgccaggcgagcagccagaccagcagcgaagtgacaatgccgcccaccattgctgacagcgcgatagccgtcaggtcctgaccaaacagcaccatcgccaccagcacgccgctccacgccccggtgttaaagcccattacgtcagggctgccgagcgggttacgcatcagcgactgaaaaatcgcgccactgacgcccagtgctgcgccaatcaacagcgccatcagcacgcgtggtaaacgccattcggtgaccaccatcgtcatactgcgcggcgcatcgcccatcagcgcggcgaatacctgcgaggtttccagcgtgacggcaccgctgcgtaatccccagatacctgcaaccacacaggcggaaaccagcagcaaacaggtgatgagtaatcggcgagagacgtaaatcatgcaccacctcgcgttttacgtcgcacgaggaagatcagcaccggtgcaccaataaacgcactgaccacagaaacgcgcagttcgccgggcacaatcacccgcccgatgatatcggcaaacagcagcagggcaggggtagcaagtagcgtgacgggcagcgaccagcgatgatcggcacccaccagccaacgcgccatatgcggcatcatcaggccaataaaggcaatcgggccaactattgccgtcgcactaccacaaagcacggtaatcgccagcagaccaatcaactgtgtgcgcgccacgcgactgcccagcgccgtcgcggtgtcgctgccgaggctcaaactgttcagcgcgcgactcagtaatagcgcagttgctccggcgatcagcaccgggatcagcaccacttttaaggtatgtagattgcgaatatccagcgaaccggcttgccagaaacgcaactgatcgtagacgtcaggattaagcagggcgatgccgctggtcagtccttccagcaccgccgccagcgccacgcccgccagggttaaacgcaccggacttaactgcccgccgccctgactgccggtaaaggcaacaatcaatgaggccaccagcgccccggcgaaggccatcgccagttgttcctgcgcggaagagtaaccaaacagcgccgcacccagcacaatggcaaagctggctccggcgttcacgccaagcaagccggggtcggcaagtgggtttcgggtgagggtttgcattaacgccccggcaaggccaagcgcgccgcctgccagtaaaccggcaagggtacgcggcagccgcgcgtcgagcacgatggtgcagtcggcgctctggcaggtgccggagaaggcctccagcactacggaagcggggagtgattttgccccaatgagcaggcttaatgccgtcgcgataatcagtaataacagcaatccgggcacggcaatggcgcgtgtcacggcaacagaaccagacatacgaacctccatgataatgaaattaattatcgttatcgatcttatttggatatgttagcatgtgcagcctaagaataggtatttaaaatatttgatggcaaggcattgtaatgaataaacaatcctggctgcttaacctcagcctgttgaaaacgcacccggcgtttcgcgcagtattcctcgctcgtttcatctcaattgtgtctctgggtttgctcggcgtcgcggtgccggtgcagatccagatgatgacacattccacctggcaggtggggctttcggtgacgctgaccggcggcgcgatgtttgttggcctgatggtcggcggtgtgctggcggatcgctatgagcgcaaaaaagtgattttgctggcgcgcggcacctgtggcattggcttcattggactgtgccttaatgcactgctgccggagccgtcattgctggcaatctatttacttggtttatgggatggttttttcgcatcgcttggcgttacggcgctattggcggcgacaccagcactggtagggcgtgaaaacttaatgcaggccggggcgatcaccatgttgaccgtgcgtctggggtcggtgatttcgcccatgattggcggtttattgctggcgaccggtggcgtagcctggaactacgggctggcggcggcgggcacgtttattaccttgctaccgttgttaagccttccggcgttgccaccgccaccgcagccgcgtgagcatccgttgaaatcattactggcaggatttcgttttctgcttgccagcccgctggtgggcgggattgcgctgctgggtggtttattgacgatggcgagcgcggtgcgggtactgtatccggcgctggctgacaactggcagatgtcagcggcacagattggttttctctacgcggcgatcccgctcggcgcggctattggtgcgttaaccagcgggaagctggcacatagtgcgcgaccagggttattgatgctgctctccacgctgggatcgttcctcgccattggtctgtttggcctgatgccgatgtggattttaggcgtggtttgtctggcgctgttcggctggttgagtgcggtcagctcgttgctgcaatacacaatgctgcaaacgcaaaccccggaagcgatgttagggcggattaacggtttgtggacggcgcagaacgtgacgggcgatgccataggcgcggcgctgctgggtggtttgggcgcgatgatgacaccggttgcttccgcaagcgcgagcggttttggtttgttgattatcggcgtgttgttattgctggtgctggtggagttgcgacattttcgccagacgccgccgcaggtgacagcgtccgacagttaatgcttaaaacagcgccttaagcctatccagcacttgcatggcgctgtagtaatccagacggaacgtctcggttcccagcgcataaacctgcttgttttgtactgcaggcaggtgcgcgagcagcggattagcataaatagcatcggcatctttctgatcaccggcgaacaggaatagtgactcgccatttaaccctgcagccagattttccccaccaagctgaatgatgtcatggcgtttaccctgactttggctggcatttaaccctgcgggtaacttcgccagcgtaaagccgagttgttccagcatctgcccttgtgctgattctggcgtccagagattggcactgtgtgcagcggcagtatagacaatggcagtgaccggctgcggcggtaatttgatttgctctttcgccgccgccagttgcttatcaaactgcgcaatccgctctgccgcttgtttctcatgcccggtaatttcgccaagttgcgttaacagcgactgccagcttttgtcgtcgtaattgatgattaatgtcggggcgatggtggaaagctgatcatacagtgccagcgccgaatccccgccggttgcgctaattaaaatcagatccggcatttgcgcggcaacggcttcggcgctcggttcgccgatatagagccgttgcagtttgcgttctttcgccaccttgctccactggcgtaaaaagccctggtcatccgcgacgcggttattcggcgtggtcgcgccgctggcgatcaccggagcatcaatcgccagcagtgagccggtcagggtgacgctggtggaaacaatacgctgcggctggctttccagtgtatgtgtgccacggctgtcagtaatctgacgcggccagtcagcggcctgaactgcggctattcctgaaagcaaaagtcctgttaatagaagggcgttgcggtagagcggggcgagtctcacaaatcagcttcctgttattaataaggttaagggcgtaatgacaaattcgacaaagcgcacaatccgtcccctcgcccctttggggagagggttagggtgaggggaacagccagcactggtgcgaacattaaccctcaccccagccctcaccctggaagggagagggggcagaacggcgcaggacatcacattgcgcttatgcgaatccatcaataatgcttctcattttcattgtaaccacaaccagatgcaaccccgagttgcagattgcgttacctcaagagttgacatagtgcgcgtttgcttttaggttagcgaccgaaatataaatgataatcattattaaagcctttatcattttgtggaggatgatatggatacgtcactggctgaggaagtacagcagaccatggcaacacttgcgcccaatcgctttttctttatgtcgccgtaccgcagttttacgacgtcaggatgtttcgcccgcttcgatgaaccggctgtgaacggggattcgcccgacagtcccttccagcaaaaactcgccgcgctgtttgccgatgccaaagcgcagggcatcaaaaatccggtgatggtcggggcgattcccttcgatccacgtcagccttcgtcgctgtatattcctgaatcctggcagtcgttctcccgtcaggaaaaacaagcttccgcacgccgtttcacccgcagccagtcgctgaatgtggtggaacgccaggcaattccggagcaaaccacgtttgaacagatggttgcccgcgccgccgcacttaccgccacgccgcaggtcgacaaagtggtgttgtcacggttgattgatatcaccactgacgccgccattgatagtggcgtattgctggaacggttgattgcgcaaaacccggttagttacaacttccatgttccgctggctgatggtggcgtcctgctgggggccagcccggaactgctgctacgtaaagacggcgagcgttttagctccattccgttagccggttccgcgcgtcgtcagccggatgaagtgctcgatcgcgaagcaggtaatcgtctgctggcgtcagaaaaagatcgccatgaacatgaactggtgactcaggcgatgaaagaggtactgcgcgaacgcagtagtgagttacacgttccttcttctccacagctgatcaccacgccgacgctgtggcatctcgcaactccctttgaaggtaaagcgaattcgcaagaaaacgcactgactctggcctgtctgctgcatccgacccccgcgctgagcggtttcccgcatcaggccgcgacccaggttattgctgaactggaaccgttcgaccgcgaactgtttggcggcattgtgggttggtgtgacagcgaaggtaacggcgaatgggtggtgaccatccgctgcgcgaagctgcgggaaaatcaggtgcgtctgtttgccggagcggggattgtgcctgcgtcgtcaccgttgggtgagtggcgcgaaacaggcgtcaaactttctaccatgttgaacgtttttggattgcattaaggagcgaggatgagcattccattcacccgctggccggaagagtttgcccgtcgctatcgggaaaaaggctactggcaggatttgccgctgaccgacattctgacgcgacatgctgcgagtgacagcatcgcggttatcgacggcgagcgacagttgagttatcgggagctgaatcaggcggcggataacctcgcgtgtagtttacgccgtcagggcattaaacctggtgaaaccgcgctggtacaactgggtaacgtcgctgaattgtatattacctttttcgcgctgctgaaactgggcgttgcgccggtgctggcgttgttcagccatcagcgtagtgaactgaacgcctatgccagccagattgaacccgcattgctgattgccgatcgccaacatgcgctgtttagcggggatgatttcctcaatactttcgtcacagaacattcctccattcgcgtggtgcaactgctcaacgacagcggtgagcataacttgcaggatgcgattaaccatccggctgaggattttactgccacgccatcacctgctgatgaagtggcctatttccagctttccggtggcaccaccggcacaccgaaactgatcccgcgcactcataacgactactactacagcgtgcgtcgtagcgtcgagatttgtcagttcacacaacagacacgctacctgtgcgcgatcccggcggctcataactacgccatgagttcgccaggatcgctgggcgtctttcttgccggaggaacggttgttctggcggccgatcccagcgccacgctctgtttcccattgattgaaaaacatcaggttaacgttaccgcgctggtgccacccgcagtcagcctgtggttgcaggcgctgatcgaaggcgaaagccgggcgcagcttgcctcgctgaaactgttacaggtcggcggcgcacgtctttctgccacccttgcggcgcgtattcccgctgagattggctgtcagttgcagcaggtgtttggcatggcggaagggctggtgaactacacccgacttgatgatagcgcggagaaaattatccatacccagggttacccaatgtgtccggatgacgaagtatgggttgccgatgccgaaggaaatccactgccgcaaggggaagtcggacgcctgatgacgcgcgggccgtacaccttccgcggctattacaaaagtccacagcacaatgccagcgcctttgatgccaacggtttttactgttccggcgatctgatctctattgatccagagggttacatcaccgtgcaggggcgcgagaaagatcagattaaccgtggcggcgagaagatcgctgccgaagagatcgaaaacctgctgctgcgccacccggcggtgatctacgccgcactggtgagcatggaagatgagctgatgggcgaaaaaagctgcgcttatctggtggtaaaagagccgctgcgcgcggtgcaggtgcgtcgtttcctgcgtgaacagggtattgccgaatttaaattaccggatcgcgtggagtgtgtggattcacttccgctgacggcggtcgggaaagtcgataaaaaacaattacgtcagtggctggcgtcacgcgcatcagcctgaaggagagaacacgatggctattccaaaattacaggcttacgcactgccggagtctcacgatattccgcagaataaagttgactgggcctttgaaccgcaacgtgccgcgttgttaatccatgatatgcaggactattttgtcagcttctggggcgagaactgcccgatgatggagcaggtgatcgcgaatattgctgcgctgcgcgactactgcaaacagcacaatatcccggtttattacaccgcccagccgaaagagcagagcgatgaagatcgggcgctgttgaatgatatgtgggggccgggcctgacccgctcgccggaacagcaaaaggtggtggatcgcctgacgccagatgccgacgacacggtgctggtgaagtggcgctacagcgcgtttcatcgttctccgctggagcaaatgctgaaagagagtggacgtaaccagctgattattaccggggtatatgcccacattggctgtatgaccaccgcaaccgacgcatttatgcgcgatattaaaccgtttatggtggcggatgcgctggccgatttcagccgtgacgagcatttgatgtcgctgaaatatgtggccggacgttctggccgggtggtgatgactgaagaattactgccagcacctatccccgccagcaaagcggcgctgcgtgaggtgatcctgccgttgctggacgagtccgatgaaccgttcgatgacgacaacctgatcgactacggtctggattcggtgcgcatgatggcgctggcggcgcgctggcgcaaagtgcatggtgatatcgactttgtcatgctggcgaaaaacccgaccatcgacgcctggtggaagctactctcccgcgaggtgaaataatggatttcagcggtaaaaatgtctgggtaaccggcgcaggtaaaggtatcggctacgccacggcgctggcgtttgttgaggcgggagcgaaagttacaggttttgatcaagcgttcactcaggagcaatatccctttgcgaccgaagtgatggatgttgccgacgctgcgcaggtcgcgcaagtgtgtcagcgactgttagctgaaacggagcgactggacgcgctggtcaatgcggcgggaattttacgcatgggcgcgaccgatcagctcagtaaagaggactggcagcagacttttgcggttaacgtcggcggtgcgtttaacctgttccagcaaaccatgaaccagtttcgccgtcagcggggcggggcgattgtcactgtggcgtccgacgccgcgcacacgccgcgtattggcatgagtgcttatggcgcatcgaaagcggcgctgaaaagcctggcgttgagcgtcgggctggaactggcgggtagcggcgtgcgctgtaatgtggtttcgcctggctccaccgacaccgatatgcaacgcacgctgtgggtgagcgatgacgccgaagaacagcgtattcgcggctttggcgagcagtttaaactcggcattccgctggggaaaatcgcccgtccacaagagatcgccaacacgattttgttcctcgcctctgacctcgccagccatattaccctacaggatattgtggtcgatggcggctcaacgctgggggcataagcatgatctggaaacgccatttaacgctcgacgaactgaacgccaccagcgataacacaatggtggcgcatctgggaattgtgtatacccgtctgggcgatgatgtgctggaagccgaaatgccggttgatacccgtactcatcagccgttcggtttactacatggcggcgcgtcggcggcgctggcggaaacgctgggatcgatggccggatttatgatgacccgcgacggacagtgtgtggtaggcacagaacttaatgcaacacaccatcgcccggtgtctgagggaaaggtacgcggcgtctgccagccgctgcatcttggtcggcaaaatcagagctgggaaatcgtcgttttcgatgaacaggggcggcgttgctgcacttgtcggctgggtacggcagttttgggatgaacccgacagaattagatgagattgcaggaaaactcggttaacggagtgatcgagttaacattgttaagttaaatattggtttcaactccgatttacatggttgctgtgttgttaaattgtacaaagatgttatagaaacaaaatgtaacatctctatggacacgcacacggataacaactatgaacaaatcagggaaatacctcgtctggacagtgctctctgtaatgggagcatttgctctgggatacattgctttaaatcgtggggaacagatcaacgcgctgtggattgtggtggcgtcggtctgtatctatctgatcgcttaccgtttttatgggctgtatatcgccaaaaatgtgctggcggttgacccgacgcgtatgacgccagcggtgcgccataacgacgggctggactatgtgccgacggacaagaaagtgctgttcggtcaccattttgcggccattgccggagcaggtccgctggtggggccggtactggcggcgcaaatgggctacctgccggggatgatctggctgctcgctggggtggttctcgccggtgcggtgcaggatttcatggtgctgtttgtttctacgcgccgtgacggtcgctcgctgggtgagctggtcaaagaagagatggggccaaccgccggggtgattgcgctggtggcctgctttatgatcatggtcattatccttgcagtgctggcgatgatcgtggtgaaagccctgactcatagcccgtggggaacatataccgttgcgttcaccattccgctggcgctgtttatggggatctacctgcgctatctgcgtccggggcgtattggcgaagtgtcggtcatcggtctggtattcctgattttcgccattatctctggcggctgggtggcagaaagtccgacctgggcaccgtactttgactttaccggcgtgcagttgacctggatgctggtgggttacggttttgtggcggcggtgctgccggtgtggttactgctggccccgcgtgactacctctctaccttcctgaaaatcgggactatcgtcggtctggcggtaggcattttgattatgcgcccgacgctgaccatgcctgcgctgaccaaatttgtcgatggcactggcccggtatggaccggtaacctgttcccgttcctgtttatcaccatcgcctgtggcgcggtgtctggcttccatgcgctgatctcttctgggaccacgccgaagatgctggcgaacgaagggcaggcgtgctttatcggctacggtgggatgttaatggaatccttcgtggcgattatggcgctggtttccgcctgtatcatcgatccgggcgtgtattttgccatgaacagcccgatggcggtgctggctccggcagggacggcggatgtggtcgcttctgccgcgcaggtggtgagtagctggggctttagcattacaccagatacgctaaaccagattgccagcgaagtgggtgaacagtcgatcatttcccgtgcgggcggtgcgccgacgctggcggtggggatggcctacattctgcacggcgcgctgggcggcatgatggatgtggcgttctggtatcacttcgccattttgtttgaagcactgtttattctgacggcggtggatgcaggtacgcgtgctgcgcgctttatgttgcaggatctgctgggcgtggtgtctcctggcctgaagcggaccgattcactgcctgctaacctgctggcaacagcgctgtgcgtactggcgtggggctacttcctccatcagggcgtggtcgatccgctgggcggcattaacactctgtggccgctgtttggtattgccaaccagatgctggcagggatggcgctgatgctctgtgccgtggtgttgttcaagatgaaacgtcaacgttacgcctgggtggcgctggtaccaacggcctggctgctgatttgtaccctgaccgcaggctggcagaaagcgtttagcccggatgcgaaagtcggcttcctggccattgctaataagttccaggcaatgatcgacagcggcaatattccgtcgcagtatactgagtcacagctggcgcaactggtgttcaacaaccgtctggatgccgggttaaccatcttctttatggtggtcgtggtggttctggcactgttctcgattaagacggcacttgcggcattgaaagatccgaagccaacggcgaaagaaacgccgtatgaaccaatgccggaaaatgtcgaggagatcgtggcgcaggcaaaaggcgcacactaaagtcagagtgagggggggatgttggcgaatgttggcttagtgcccagggttccctctcaccctaaccctctccccggtggggcgaggggactgaccgagcgcgttgatagcatttgtaggccggataaggcgttcacgccgcatccggcactctttcagcaacatggttagcggaggccaagatgtttgattcactggcaaaagccggaaaatatttaggtcaggcggcgaagctgatgattggtatgcctgattacgacaactatgtcgaacatatgcgggttaaccatcccgatcaaacgccgatgacctacgaagagtttttccgtgagcggcaggacgcgcgctacggtggaaaaggcggcgcgcgctgctgctaaatttgtacgtcaggctttaaacgattccacttttttgaacgctgcacgcaacgtatctggtgtcagcgtgactggcaggtaatgaatggactccaccggacgcagggtgtgggcaatcactttgtcgatctccgcctgattattgatatccacttccagctccgccagtgtagtcggcagatgaaaacgctgatacgctccagttaattgcgccagcacatcatcctgacccagcaaggcgctttgcaccagaattccgtaggcgactttggtgccgtggagaaacttctcggtttgcggcagcacggtcagaccgttatgcacggcatgagctgccgccacacgcgtaaaacgatcgcccagaccaccaaccatcccaccaccagcaataatagcatccaccacatcgcaaaatgattgcgttaactgttgattttgctgatcgctcagcgcctgttcgctactgtttaacaagacgtcgcgaatggcttgcgcattattgatccccagtcgcacggttagcggcaacgtttctggttgcggagccagcaccaccgcttcataccatttcgccagcgtgtcaccgatccccgccagcagatattgttgcggtgcattgaggataatctccggttccaccagcaccataaaattggcgtcgtcgaaaatctcataatgcagcgcctgtccggcatcattataccagacggagagcggtgtccaggcggcgcaggtggcggcgatcgtcggaacggcaacaaacggcagaccgagacggcgggcgagggctttcgcggtgtcgagcagtgcaccgccaccgacgccaatcaccacgctgcggtcgtcaccggactcagccgccagttgttgtacatcgctttcgctgcaatgaccgcgaaacaaaatatgctttgcccctggcagtccaaacgctggcggaagtttggtttgcgccgcagcaatggcgcgtttgccgtagatccacaccgcgcgagaaagttgttcatcagtgaaaaaatcgtgcaggtgattgaaacttcctggatgtgaaaagtagttagccgggccgacgaccacgcggataggattgtgaggcatgttgtgttgtccttattgttttatttagacatctaaacgtcttgattgccaaatactagcatcgtgttatagtgccttcaacacgcaacttcgtcaggtacaataaaaatgacaaataaccctctgattccacaaagcaaacttccacaacttggcaccactattttcacccagatgagcgcgctggcgcagcaacaccaggcgattaacctgtcgcaaggctttcctgattttgatggtccgcgctatttacaggagcggctggcgcaccacgttgcacagggggcaaaccaatacgcgcccatgaccggcgtgcaggccttgcgcgaggcgattgctcagaaaacggaacgtttgtatggctatcaaccagatgccgatagcgatatcaccgtaacggcaggggcgacggaagcgttatacgcggcgattaccgcactggtgcgcaatggcgatgaagtgatttgttttgatcccagctatgacagttacgcccccgccatcgcgctttctgggggaatagtgaagcgtatggcactgcaaccaccgcattttcgcgttgactggcaggaatttgccgcattattaagcgagcgcaccagactggtgatcctcaacactccgcataaccccagtgcaactgtctggcagcaggctgatttcgccgctttgtggcaggcgatcgccgggcacgagatttttgtcattagcgatgaagtctacgagcacatcaacttttcacaacagggccatgccagtgtgctggcgcatccgcagctgcgtgagcgggcagtggcggtttcttcatttggcaagacctatcatatgaccggctggaaagtgggttattgtgttgcgccagcgcccatcagcgccgaaattcgcaaggtacatcagtatctgaccttttcggtgaataccccggcacagctggcgcttgctgatatgctacgtgcagaacctgagcattatcttgcgttaccggacttttatcgccagaagcgcgatattctggtgaatgctttaaatgaaagccggctggagattttaccgtgtgaaggtacatactttttgctggtggattacagcgcggtttctaccctggatgatgttgagttttgccagtggctgacgcaggagcacggcgtagcggcgattccgctgtcggtgttttgcgccgatcccttcccacataaactgattcgtctctgttttgccaagaaggaatcgacgttgctggcagcagctgaacgcctgcgccagctttagctatttaaccgtccaggcgcgggaatattgacggtcggcaaacaactcttgcaggccgttaatttgcttcaggcgcagcacttcgtcgctgtccattcccagctctttgccaattttattatcgtcccatcccaactggctaagttcacggacgatttccgacatggcggtgatttgatggcgtccacgagcgcgattatgacgaatagtcgcggcgatgcgttgattacgcgtaccttccagacaggtcaccggcaaataaccttttaagcgtaattttaatgatgatgagcctttaccaatttcatggcggtgaaaaccatccacgatttccatggcatttttatccgtatgtgtgaccacaatgggttgggtaaaaccatctatttcaatggatttttgcagcagttttttttcgggtggtgccacgttgtttgggttgtaatcattaggcataagttggctgtttttaacccacagaacgcaatccactggctcttcacgaaaggggctaacctgatggatcgccatgcggatttcattaatcgctttgatgcgatcatcttccggcaagctggcgagaaattgcgttaaatcctgcgttaatcgttgttgcatagtatcccccattcctgacgttttccttttatccgttcgttataacgctgatagttcttcgattttgtggggctaaatgataatgcccgacaccagtaatcgttattgagtaaaactttgcatatccgccgccaggaggggatatctttcgcgccaatgtccccttgctgggtttgtggaacctcgatgccttttttctgataccagtgcaaataaatggcgattttattgcggtaatgctcagctgttttttccggcatgctattgagcagcaataatgcatattcttgccagtctaaatgttctggcttgaggattttccgatgcccatagaaatgattgtcatgtccggcgtaaatgccgccactttttaccccgctgactcgtgcgcacatagcagcccagcgatccggttcgataacgtgatagagccataatccttgtcgttgctccgggccaaaaggttcgcaaattcgcatatgacgcagaggaacgcctgcctgatacattaggttatacagtgggttgcagagactttgatgatttgcataccaggtccagatatcagccactttccagtcgtaaatggggtaaatgtaccagctatgaccgcctggtgcggccgtagtccagggtttatcgtcggcaaaacgttgtttatttaaactggcgatggcgacaaaacggttgtaggactcatccgcacggatgccgatcatcatcgccgccggacgtttttgtgaaaaccattcggcaaactcacgtacaaattgttcgaaggtcatgcctggctggtaaaaggagaaaaagtcagggtcggttatcgcatcttggggaggttgacgtacccattcgacatcaggttcccagcactgccattcgggttggtattgtgaaagggaattttgcgtcgtaagcgggagcgcaacccagtaaaactcttcgatgacatcggtgtacaactcgcgcagggactgaacatagttaatggtgcaagagaattgcgcctcccagtcgataaacaaaacgcagatttttttgcccatttgtcgggcaagttcggctgtcagatgcagcattaaaccagagtctttgccgccagaaaatgagacacaaacgcggggtagggtgttgagtgtccaggtaatacgctctcgtgcagcttccagaatattgagcggaagaggaattttataaatagacatctgaagacgctctctgaacgttacagggtgatcagtgagataagtctgttaattataaagtaaacactgtaaagcagagtgttttatttttcattcgcgctgtgaataaatagatgaaagttatagtagctgtctgtagttatatatcaaaaactctcatttagacggtcaataaatcgggagaacaccaaattatttaaagaagatttattataggaaatgtaaagctttattgaaggtaacggatgttctagttttatctcttttaagttaagaaagtcacggtagaaattataaagttcataggggactattcccagtaaatctgtaactgcaatgctattaatgattgtcagcaaagaggaaccacgaaatgagattttgcgattcataaatctctcgtctatttccatttgaatatcatcaacccctgctgatttagatattaattgggtgaactcttctgccataatttgttcataagtgctattgtcagtaattcgtggatgcctattactacaaattagagtattgcgaatcgtatgcaatggcatgcaaatgacggaacggctgatcactggcatttgggtgatcaccagatcggctttgcggtgaaccaacagttcttcagcattctctgctgacatgaggatatcatggcactcaatctcgacagaggaatcttgccgtaggcagcggatcagcatactattattagagcaagaaatgagctgagggccgtagataataaagtttttctttagttcggacttattgactatattaattgtttgttcaaggcctctgagatttttctcaagatggtgatgcagatttaaccctgttgtcgtcggcgcgataccttttcctgagcgaatgaataaagggtcattaaattgcgcacgtaagcgttgtaacgactggctcacggctgatggggtgatatatagtgattcagcagctttgctaatgcttaaatgctggtaaatacactcaaatatgacaagaagatttaagtcgaactttttcaagtcgtagagattggccatacactactccggttatatttttcttccatgatatattcacttaatcaatgtttttttgcgtatatatttttattgattatgtttttttgcttaactcaggattaagtttttctaaaatagcacagccacttagggcagagcgagcaattcatgcttttttaggatggttgaaaagcagggatatagttcaaccatccatgaattaccttttatttattccccataatgatattaagcgttttctgatcgggcaaccccacggcctgttgtagcgtattttccttactcatgtaatagatagccggcgtgacatttgcccccagatcgtccatcagtttctcattgtcacttaacactttcatttgctctgtacttacgtttgcaggcacgtttagcttaagcttgccaccagaggcttcatattgttgccaggtttttgcgggatctttggaggcaagaattgccgctgctgtcgccgggctttctggcttgataaccccaaccaacaatgttcttaattgcactttgccagaatctacccacgggcgcgcctgctgccagaactgtttacaatatgggcagaacggatcggcgaagacgtagacaatgaccggcgcatcttttttaccgtcgaggagccagtgggattgttccatccgttgccacatttcgcgtccggctggtgcgtaaatttctttttcgataagtgtgttactcaggttttcacctttctcgttgtacatgtaaccagagatagcgtgcttaccatctggagtcaggtagatggtgacgcccatatcctgatactttccgagataacctttcattcctccgggggcatcgaatgttttgatgattgtaatgccctgtttttcaatcgcttttactggagcaggaagttcctctgcgaaggcgattgcaggaagcagagccagtaaaagtatcttttttaacattaatttgtccttttcagtcagtgcaaaagtcgagtaaaaggcataacctatcactgtcataggtaagagcttagatcaggtgattgccctttgtttatgagggtgttgtaatccatgtcgttgttgcatttgtaagggcaacacctcagcctgcaggcaggcactgaagataccaaagggtagttcagattacacggtcacctggaaagggggccattttactttttatcgccgctggcggtgcaaagttcacaaagttgtcttacgaaggttgtaaggtaaaacttatcgatttgataatggaaacgcattagccgaatcggcaaaaattggttaccttacatctcatcgaaaacacggaggaagtatagatgtccttgattaacaccaaaattaaaccttttaaaaaccaggcattcaaaaacggcgaattcatcgaaatcaccgaaaaagataccgaaggccgctggagcgtcttcttcttctacccggctgactttactttcgtatgcccgaccgaactgggtgacgttgctgaccactacgaagaactgcagaaactgggcgtagacgtatacgcagtatctaccgatactcacttcacccacaaagcatggcacagcagctctgaaaccatcgctaaaatcaaatatgcgatgatcggcgacccgactggcgccctgacccgtaacttcgacaacatgcgtgaagatgaaggtctggctgaccgtgcgaccttcgttgttgacccgcagggtatcatccaggcaatcgaagttaccgctgaaggcattggccgtgacgcgtctgacctgctgcgtaaaatcaaagcagcacagtacgtagcttctcacccaggtgaagtttgcccggctaaatggaaagaaggtgaagcaactctggctccgtctctggacctggttggtaaaatctaaatttccttcgtctttcacgccatagcggcgttggcgtcgcccgctcaccccggtcacttacttgtgtaagctcccggggattcacaggctagccgccttgctctgacgcgaaatacttcggaaattcacctaattcttcgggtgctgcggcacccgattttcttccccgcaccatgatgcaagctgcatccaggtagccgcagaggccgcttgcatgatgatgtttaaagcccaggagataaacatgctcgacacaaatatgaaaactcaactcaaggcttaccttgagaaattgaccaagcctgttgagttaattgccacgctggatgacagcgctaaatcggcagaaatcaaggaactgttggctgaaatcgcagaactgtcagacaaagtcacctttaaagaagataacagcttgccggtgcgtaagccgtctttcctgatcaccaacccaggttccaaccaggggccacgttttgcaggctccccgctgggccacgagttcacctcgctggtactggcgttgctgtggaccggtggtcatccgtcgaaagaagcgcagtctctgctggagcagattcgccatattgacggtgattttgaattcgaaacctattactcgctctcttgccacaactgcccggacgtggtgcaggcgctgaacctgatgagcgtactgaacccgcgcatcaagcacactgcaattgacggcggcaccttccagaacgaaatcaccgatcgcaacgtgatgggcgttccggcagtgttcgtaaacgggaaagagtttggtcagggccgcatgacgttgactgaaatcgttgccaaaattgatactggcgcggaaaaacgtgcggcagaagagctgaacaagcgtgatgcttatgacgtattaatcgtcggttccggcccggcgggtgcagcggcagcaatttactccgcacgtaaaggcatccgtaccggtctgatgggcgaacgttttggtggtcagatcctcgataccgttgatatcgaaaactacatttctgtaccgaagactgaagggcagaagctggcaggcgcactgaaagttcacgttgatgaatacgacgttgatgtgatcgacagccagagcgccagcaaactgatcccagcagcagttgaaggtggtctgcatcagattgaaacagcttctggcgcggtactgaaagcacgcagcattatcgtggcgaccggtgcaaaatggcgcaacatgaacgttccgggcgaagagcagtatcgcaccaaaggcgtgacctactgcccgcactgcgacggcccgctgtttaaaggtaaacgcgtagcggttatcggcggcggtaactccggcgtggaagcggcaattgacctggcgggtatcgttgagcacgtaacgctgctggaatttgcgccagaaatgaaagccgaccaggttctgcaggacaaactgcgcagcctgaaaaacgtcgacattattctgaatgcgcaaaccacggaagtgaaaggcgacggcagcaaagtcgttggtctggaatatcgagatcgtgtcagcggcgatattcacaacatcgaactggccggtattttcgtccagattggtctgctgccgaacaccaactggctcgaaggcgcagtcgaacgtaaccgcatgggcgagattatcattgatgcgaaatgcgaaaccaacgtgaaaggcgtgttcgcagcgggtgactgtacgacggttccgtacaagcagatcatcatcgccactggcgaaggtgccaaagcctctctgagtgcttttgactacctgattcgcaccaaaactgcataagaagaagtaagattcacctgcaattgcttagccgccggggtcaaacctggcggcttttttatggcattaaaaagccccgccgggatggctccgggcagggcgggatacttattctggcaattaacgcacaaccagcaccggcagattggcgtggcggatcacgctcgaggcgttagaacctaacagatgggtcgaaatcgatgggttgcgagaaccaataactacaacatcagcccccagttcttctgccaactcattgacttcatcccgcacgctaccaaaacggacatgttgtttaatgcgggaaggatcgatggtgaagtggctgaccatcgtttgcagacgttcttgtgcttcatgttgcagatgctcttcaaaacgacgcacatcagcggcaaaacggtgcaggctcaggctggctgacccgggtagtacgtgaagtagatgaataactccgtcatcctgggcgaggaattcagcgtggcgaacagctttgtcgctcaattccatttcaaatacatcaactggcataatgattgtcttatacataaccctttctccctgttaatcatgaacaaatcattcgccatgattataatatttatccctgatatttgtctggttctttttccttacgaactgtttctgtgatgaatatattctcactgaacaccaggaattctcccaaaacctgtggtaccgcccgttttcccgctgtgatagctacccttaaagactgactcttttttgaactgtctctggaggttgcatgaaagcattgacttatcacggcccacatcacgttcaggtagaaaatgttcccgatccgggcgttgaacaggcagatgatattattctgcgtattacggcaacggcgatctgtggctctgacctccatctttatcgaggcaaaatacctcaggttaaacatggcgatatttttggtcatgaatttatgggggaagtagttgaaaccggaaaggacgtaaaaaatttgcaaaaaggcgaccgagtggtaattccgttcgtcattgcttgtggcgactgttttttctgtcgattgcaacaatatgccgcctgcgaaaataccaatgcgggtaaaggcgctgcgctcaataaaaaacagataccagctccagcggcattgtttggttatagtcacctgtatggcggcgttcctggtgggcaggcggaatatgtccgcgtccctaaagggaatgtggggccgtttaaagtaccgcctttgctttcagatgataaagcgcttttcctttctgatattctgccaacggcatggcaggcagcaaaaaatgcgcagatccaacaaggttcaagcgttgcagtctatggtgctggtcctgtgggattgttgacaatcgcctgtgcacggttgctcggtgcggaacagatttttgttgttgatcatcatccctaccgcttgcatttcgccgccgaccgctacggcgcgatcccgattaattttgatgaagacagcgatccggcacagtcaattattgaacaaacggcaggtcaccggggcgtggatgcagtaatagacgccgtcggttttgaagcgaaaggcagcaccacggaaacggtgctgactaacctgaaactggagggcagcagcggtaaagcgttgcgtcagtgtattgcggcggtcaggcgtggcggcattgttagcgtaccgggcgtctacgctggatttattcacggtttcctgtttggcgacgcctttgataaagggttgtcgtttaaaatgggacagacccacgttcacgcatggctgggagaattattaccgttaattgagaaaggattactgaaaccagaagaaattgttacccactatatgccgtttgaagaggccgcccggggatatgagattttcgaaaaacgtgaagaggagtgccgtaaggtgattctggtacccggtgcacaaagcgcagaggcggcgcagaaggcggtttcaggtctggtgaatgcgatgccggggggaacaatatgatcgtcaggagtggttttcgaggtaaaggacagccatgacgataatcgccgccataatcagaaatcctatcaggatgtaaaatgcttctgccatggttattcccacaaacgaaacggaataattttgcagcaaaagtgaacagtgagaaccaggaaaaattgctgattttgcgtaaagaggatgcgagtgcatcctctgggcaaagcgagttatcgcttgtgcagatgggattaaagcaggtagtcgccagcagcttctggctggtattcgagttccagcacttcaaggtgggttgcaacgccgcccggaagttcccagtgaatggaatcgccaacgcgcagccccagcagtgcggcacctaccggagccataacggaaagctgagtattgctatcggtcatttttgccggatacaccagcgtgcgcacacgcacttcgccatcgctaagattgcggaatttaacccggctgttcattgtcaccacgtcgtgtggcatctcttctggcgaacacatttgggcgcgatccaactctgcgtttaacgcgtcggcgattggcaaaccagcataggcgggttgctccagcagaatatcgatgcgttcggcatccaggtcgttaatgatgatagttggtctggacatttttactccatgtcgtcggtgctgcgagtgtcgcagataaacatacccaaaagaaaaccctcaccgtcaggcggcgagggtttaactcacatgatgatactgactgttgctcactctttgaagtgatttgcgtcacattcagggaattcctcaatgcagcgcattatgtataaatcttaatcgccttggtttatggaagacgaattagcgtgttttgtaaatcagatgattaataacccgctttatcaatcacaaaggttttgccacagttacctgggtgaggttgtggcaagaatgagtttgcagaaagcggagcgttgatggcgtcagctttgatcgagatctgaatttcagtcaaatacgcagggttaccctggcacgttagcttaactgctttcacgttctcttttccccagcttttggcaaaggcggcgtcaaagtcacggcggctcactgttttaccgtaattatccgcaaggaattttccggcttcgctctctttaatttcttgattcaggcgtaccatcgtaccgaagtatgcgtccggatcaaaaccaaagcaggcaccgtgtttggcatattcgtagcgttccaggcaggaacgtccgccagctcctggcatgacttcacttagtttagcggccgtttccagtgataatccggtttccggcgatgaacacattcggctggcgcgcgcttctggtagattcgggattgggcgagtagcgcaaccgaagcgcatccagcggcgttcatcaacaccacgggcagcaaccgatttaggcaatcctggccacagaccatgtacggtcagaaaatcagctttgttggtcgtttcggtttgcaggcgacattcatctcgttcgttacgatttcgatcgtgttgactctggcaaaatccggtttgccaggagagggccaggacatagcgatcaaaatcgccatactgttttgcctgcaacgctaaggcgttggcagaagagaagggaagcagagaaaccgcgagcaacgcggcgttacgccagaatgctttcataatgggtgtggaactcatacatacactgaatactatctattaaatcatcacgcccgccaggtgggcttacctggcgggcgtgatgatttattcagcgtttggcgaacgtattagttccacatggcgagaatcggccagccaaccaacagcaacatagagatgtaaatcaccccgaagattgcgccaagacgccagtaatcttttgatttcacatagccacagccgtaaataatcaccccaggaccggttgcatacggcgtcagacagcccatgataccgatagacagcaccagcaggatacacagttgttccattggtacgcccggaatacctttaccgacggccagaataaccggcagcatggttgcggtgtgcgcagacaggctggcaaacaggtagtgtgcaaagtagaacaccagaaccagtacaatcaccgttgcgtttggtgagaatccttccaggtgcgtactcatggtaccggcgaaccagtcaataaaaccagaacgagtcaggccgttagccatcacaaccagagttgccaggttgaccagtgtgttccatgcgctgttatagcgggtaatgtctttccaaggcacaacgtgcagggccagcattagcgaaactgccagcagaccaaccgcagtagcattaatgacttcactgccaaatacccacaaacctaagctgagcaatacaaggccaatcagtgtccactctctgcgtgtcagcgcacccatggttttcagttcatcacccgcccaggttgccacttcttcactgtgtgtgatttccggtttgtacagcacgtaggaaagccacggcgcaatgataagcaagataaccccaaccggcaggaagcagaggaaccactgcaaccagctaatctggataccggcaattttgctgacgaactccagacccagcacgtttggtgccgcaccggtgacaaacatggacgaactcagactggtactaatgaccatcatccacatcaaatagccgccaatacgacgcgcggacggatcgttcgggaatgatttaaacaacggcggcaggtttttaatgaccggaaaaaccgtacccccggtacgcgcggtgttggaaggtgtaaacggtgccagcagaatgtcgataatgacaatcgcataacccaacgtcagcgtgcgtttgcccatgaatttcaccaggaaaagggcaatgcgacgacctaacccggaaacttcataccctaatgcaaaaataaatgcgccaaataccagccataccgtggtgctggaaaaaccagccaggccccatttcagcgcctgtttttgcgcattaaacgctgggtcagctaattctttggcatcaaagagcaggtaattactgccaataacgcaaatagtaactgcaataaaactgatcgctgttgccggaattggctcgaggatcatgccgacaatcattgccacaaacacagcgaagtaatgccatgcctgcggcggcataccgtcggggacagggataagaaacatgacacccatcaccaccagtggggccaatagtttccatatattatcttttgctaaagacatacgggttctccgaaaattaatatttccaaatttatcaagtgcttaaataattaaatctgtgctaaaaaccaggtaaggatcagtaggtcagcactgccgcctggactgagatttcgttcgatacactccctgtcgaactgccggagataatcgagatcggcgggggttcgaatgccccctttttgcaataatgtttgcgcctcgcgctgtagccagcgcaggcccccctcgccaccgcgcgatgcaacgttggtatcgccgttgatcgccatcagtaggagcaaggtatcgagcaatgccagttcaggatctaacccctgatccagcagagtgaggtaatgcggcaaggcgtgattgatcaccagtggataacccgcttcggcttcaccgcgtgcgccggtaaggccaagctgttggtacaaccgttgacctgccgtcagttgtgaattattggtacgcagttcgcgatcggtcaggccacggcagaaacttgccgccgtagaacaaacggttgttggcgttaccggttggttgagttgaagcaaacggccaattgccgcacatagcagccctaaagaaaaaatgctgcctttatgcgtgtttacgcccgcagtggcgcggaacatatcaccttcgcaagccataccaattgggcgtaatccgtggagtaccgcttctggtgccatttccgcactacaggcaccaaattcaatgaaacggggtagccagccctgaatcgccagcgcgctgcggtggaaatcttccagcgccatatctttgtgcgcaccgcagttaatgcgatccacgaggcctggtttcggtgacagattgacttcagtcagcatggcgcgccagcccagcagggcgtactcatcgattaatgacgtcgcaagctttgtggttttagttgacgttgcaggcatcgacatcgttcagcagtgcctccatgcggttgagtaaatcggtcagttgatgggtttttccacgcgcgcagacggctgcgctttgctcgcacaacaggcagcggcgaggcggcagtgaatagtcgcggcgggagagaatttcgccttcgggcgtcaggacatcgatatcccataaccgcccgagaggatgactatgttcaagctcaatggtggcgagcttgaggtcgcgagccggggcggcaatgctcaacatgccctccggcccgctggcggaaaccagtgcagcctgctcctgaatttgccagccctgttttgcggctaaggcacgcaaggctgtcacgccatgattaaaaattcggcgtgtgacctcgctgtctttaatcggcccaggcgcaaccacggtaaaggagaccagtggaacaggatggcgcttgagccagacgtgttgccgtgcttgcctttcatcccggctgacgagcagctcgggaattgataccgcatggtggctggcgagttcaggaagcaggtgcatggcttattccttcacctgatgcacaacatcgatcaccgagccatcgcggtaacgcacaacggcaacgacgcggtctgtgaattcaatcggctgtggttcaccggtcagcagacgcgcacgttcgcgcagccactcaatggaaaccactttaatgcccgcttcctgcagacgttctgccagttccggacgtgccgggttaactgcgataccgtggtctgtgaccagaatatcgacactggagcctggggtgatgcaggtcagtacgttatccaccagagtcggaatacgaccgcgtaccagcggcgcgacgatgatggaaagcgcagaggcaatcgcggtatcgcagtgaccaccggaagcaccacgcagtacgccgtcagagccggtcagcacgttaacgttgaactgggtgtcaatttccagcgcgctcagtaccaccacgtcgagacgatcaaccgatgcgcctttcgaaccccagttagcgtactggttggcgctgatttcgatgtgattggggttacgggccagcgattgcgcagcatggctgtcaaagctctgcacatccagcagtttgcggatcagacctttttcgtgcaggtcaaccatcgtcgcggtaataccgccaagggcgaagtcggcgcgaatatcgcggctacgcattttgtcttccaggaaacgggttaccgccagcgatgcgccgccggtgccggtttgcatggagaaaccttctttgaagtagccagagttgacaatcacatccgcagcgctacgggcaataagcagttcgcgcgggttagtggtcatacgggtcgcgccagcgccgatttttgcagcatcgccaacgcggtcaactttgacgatcaaatcaacctgatcttgctcaatgcttgccggattatgcggataaggcagcagttcttcggtaagcatcacgacctgttttgcgttgtcggcatcaaccattgcatagccgagggagccgcagcaggctttaccggtgtagccgttggcattaccgaattcatcacaggacgggacgccgaggaaagccacgtcgatattcagttcgccgctctgtaccagatgcacacgaccgccgtgagagtggatctgcaccggttctgccagcagaccacgggagatctcttccgccagtggaccacgcaggccggaggtataaatgcgggtaaccacgccctggcgaatgtgttctaccagcggcgcatggcaatcactcagggagctggacgccagggtcaggtttttaaagcccatcttcgcgatgacgtccatcaccatattgacggtcaggtcaccgccacggaaagcgtgatggaaggaaaccgtcatgccgtcctgtaaaccagagcgacgaatcgcttcttccaggttggcgcacagtttgcgatcgcgcgctttttcagcctggtaggtttgctttggcgagttctggaaagcggcaagatcgcattcagcgcgacgattccaggccgctacccgttcttgtcgttgagattgttcaattttctgcgtcattttgattgccttattcttcgcggatgccggaaagttctgcacgggagagcaccagacgggcgcgatcgataaccggaccgtccaccatcttgccgttcagggaaaccacgccgaggccttcgcgagcggcggcttcagcggcttctacgacgcggcgggcgtgatccacttctttctgggtcggtgcgtagaggttgtgcagcagatcaatctgacgcgggttgatcagcgatttgccgtcaaagcccagctgtttgatgtgggcggcttcttgcagaaatccggcttcgttgttagcgtcggaatagacggtatcgaacgcctgaatacccgcagagcgcgcggcctgcaaaatggaacagcgtgcgaacagcagttcagttccttccggggagcgttctgtacgcaggttgcgcacatagtcttctgcaccgagggcgataccgatcaaacgctcggaagcgtgagcgatttccactgcgcgggtaatccccagcggagattcaatcgccgccagcaggccggtgctgccgggttcacgaccacaggctttttcgatacgcaggatctctttttcaatatccagaacatcctgagcggtatcggttttcggcagacgcacaacgtccgcaccaccgcgaacgacggcttccaggtcgttaacaccccattcggaatccagcgcgttgacacgcacaatggtttcaatatcgcgatacagcggatgttgcagcgcgtggtaaaccatgcggcgggcggtgtctttttcacgcaatgctacggagtcttcgaggtcaaacatcagggcatcagccgggtagatgaaggagttgctgaccatcgcggcattggcaccaggcacaaacaacatgctgcggcgggtgcgagttttacgttgttgcagcgaagcggaaatcattggcaatcctcccatggcagagccgggataccgctggcgcgtgccagcagggcttccagtcgtgcacgtaaaatgcagtccagtgcgcctttgtcatcgacattcagctgtacgccgcgcacgttgtagcgggcgagaacgtccagaatggtggtgcgaattgcatcgccaaactgtttctcaacgctgctattgatttgcaggtcgatatcctgcgtatcgagtggggcgatgcgtatcatcacatccccagactcaagggtgcctgcaacggcgggctggtttattttcatttttcacctgtttctcatgcgggggtcttttgacgagctgccgcgtcctggcgggagtgctcaagcaggttctgcaaataatgcagcgtgactgcagggaccagcggcgcgatagccgtgagatcgtttttcgccagcagttgacgtacccgggaagcggatatcggcatctcctggtaacgcagccgctcaatttcaaccagttcgatgggtggtgcggagatagtcggcgtttccagccagtagcgcatatcctggttgtactgggcggtaacgcgacaaaagggttcagtaccgacaaagcggtgagttacacccagcgcgggagcgaggtactgacggaaaatcttcagatcaatttcggtgtaacaatggttaatgacgctctgttctttaatgaagtagcaagggaacgtagcgcgggagatgatgtattcggagccacgatgcacagtcaggcgtggaatatcggcggtgccttttaacaccaaatccagccggtcttcataggggaagcgtgaagaatcttctttgactaaaaacagatgcaaccagtcgcactgtgccgcagcctgttgaatcagataacggtgaccattcgtaaagggattggcgttcatcacaatgcagccaatcttgttccctggatgacgaaattttttcagcgattcggcatagcgtttcagtcgcgtggcgctgttttccatcagcaccatcacgccgggtacgctggtcagcgtggaaaaaccgcactggcggaacagcgcctcgtattcggttttggtataaataaacagatgcgtgctgtgccgctcataggcgaggtttatcaattcagtggctaatgtcagcgccagtccttcaccgcggacggattcactgatagcaacgcatttaataatatttccggcaattccaccgcacgcgataagcttttcatcgcgggttacggtaataaatacttcgactgtggtgtcaacgctcaaatcattttcatgcaggaattgggcgatttccgccatttttttattttctgaacgttttacgcgggtgaaaatatcattgccgaacataataaatagtatcctgaaggtgcatgttgttatcgatttgcaacgaatgttgttcaatgttgcaaactgataaccttttattttcacttgggagaaagggggtgatcgaggtatatctttttctcctttcgctatacatcctaaggagtatttcggcgtgaaattttgatttatttcacatagagttagtggttttttatttatttaatgattttaagttttttaattaatgtaattacgaaatgactcgcaggtttaagtgatttaattgatttaatgaataaaatttgccacgatcataattaatatctatgtattttgattcaacattttaattacatccgtcaaagaggctcgggacaacccgcaaggaaaacaatgttgcagcttaacgagaataaacagtttgcatttttccaaagactggcatttccgctgcgtatctttttgctgattctggtgttctcaatatttgtcattgcagccctggcgcaatattttacggccagttttgaggactatttaacgcttcatgtacgcgacatggcaatgaatcaggcgaaaattattgcctccaatgacagtgtcatctctgcggtgaaaacgcgtgactacaaacggctggcgaccatcgctaacaaattacaaagagataccgattttgattatgtggtgattggggaccggcactcgatccgcctttaccatcctaatccggagaaaattggttatcctatgcagttcaccaaacagggcgcgctggagaaaggggagagctacttcattaccgggaaagggtcaatggggatggcgatgcgcgccaaaacgccaatctttgatgacgatggaaaagtcatcggcgtggtgtcgattggctacctggtgagtaaaatcgatagctggcgggctgagtttttattaccgatggcaggtgtgtttgtcgtgctgttagggattctgatgttgctgtcgtggttcctggccgcgcatatccgtcggcagatgatgggcatggagccaaagcaaatcgcacgcgtggtccgtcagcaagaggcgctgtttagttcggtttatgaagggctgattgcggtggatccgcatggttacattaccgccatcaatcgtaacgcaagaaagatgctggggctgagttcccccggacggcaatggttgggtaaacccattgttgaagtggtcaggcccgccgatttctttaccgaacagattgatgaaaaacgtcaggatgtggtggcgaactttaacggtctgagcgttattgccaaccgggaagctattcgttcaggtgatgatttgctgggggccattatcagctttcgtagtaaagacgaaatttccaccctcaatgcgcaactgacgcaaataaaacaatacgttgagagccttcgtacattgcgacacgagcatctcaattggatgtcgacgctcaatggtctgttgcagatgaaagagtatgatcgcgtgctggcgatggtgcagggggagtctcaggcccagcaacagcttattgacagcctgcgcgaggcgtttgccgatcgccaggtggcggggctgctttttggtaaagtgcagcgcgcccgggaactggggctaaaaatgatcattgtccccggtagccagctttcgcaactgccgccaggactggatagcaccgagtttgcagccattgtgggcaatttacttgataacgccttcgaagccagcctgcgtagcgatgaaggaaacaatatcgttgaattattcctcagcgatgaaggcgatgatgtggtgattgaagtcgccgatcagggctgcggcgttccagagtctctacgagacaaaatatttgagcagggggtcagtacgcgtgctgacgagcccggtgaacatggcattgggttgtacttgattgccagctacgtaacgcgctgcggtggtgttatcactctcgaagataatgatccctgcggtaccttattttcaatctatattccgaaagtgaaacctaatgacagctccattaaccctattgatcgttgaggacgaaacgccgctggcagagatgcatgcggaatatattcgtcacattcccggattcagtcagatattactggcgggaaatctggcgcaggcccgaatgatgatcgagcgttttaagccggggctaatcttgctcgataactatcttcctgacggtagagggattaatttactgcatgaactggtgcaggcgcattatcccggcgacgtggtgtttaccactgcagccagcgatatggaaacggtgtctgaagccgtacgttgtggtgtatttgattatctcattaagcccattgcctatgaacggctggggcaaacgctaacccgtttccgccagcgtaaacatatgctggaaagtattgatagcgccagccagaagcaaattgatgagatgtttaatgcttatgctcgcggtgaacctaaggacgagctaccgaccggcattgaccccttgacgctaaacgcggtgcgaaaactgtttaaagagcctggtgtgcaacatacggcagaaacggtggcgcaggcactgaccatcagccgcaccactgccaggcgttatcttgaatattgcgccagccgccatctgattattgctgaaattgttcacggcaaagttggcagaccacaacgcatataccacagtgggtgacatgataaagccggaggaaacttgcctccggcattactatttacttgcctgtgaccgctgctgccgttcctggcaccatcagctctgtagcaacgataacaatcaccaagccaacaagcaccggtaccgaggtgcgttttacgacttcaaacggcgagatcttcgccatcccggcaaccgcaacgactacgccagaaacgggcgaaagggtacggccaaggtttgacgcctgcagcatcgggatagtcaaatacgccgggttaatgccggaagagtgcgccagtttcgggatcatctcaacaaacgcataaaacggcgcattgcctgaaccggtcgtgactgccgccagcattgtcagaatcaccaataccagcatcaggatgatactcgccgaaccaaacgaggtagcgatagaaatcagactttgaataaagccgatggtgctaagcccctgagcgaataccccagcggcaaccagcagcatcaccacgttagcaaacgcatctgccatcccgcgataagccacttccagaccagagaaaactttctgggtattaaagctgcggaggaactccagaatggaggcaatcagcatacaaatcaccagaatagtgatgatgtgtaattgcggaccccatttaccgtcaaaaatcagtacaccgatgatcggcgtgaacggcaaaatggcataaaacgcaggagcagtggtggtgatttcactgacatctaacatttcatgagagatgtgctcttttttatccagataacgttgccagaagaagtgggcgatcgccatgccgataattgcagcaattgagataggcagcgtcgttttgaaggcgaagtcaatcagcgacatttcggaagcttgcgccgccagcaccacatcccctgaagtcggtgcgagaataatcgccgccggggaggcacaaatggcagcagctgcgccacgactgataccaacgtttaccatcaccggaaatagggttgccatcagcaaaacacccagaccggttgcggaagagacggccagagacatcagacaggcgacaaaataggcggcaatcatcagcaggtaaggggagttaatatactgcaatggttttgacgccagcttgaccaccatatcattcgcgccgatatgggtcatgtaagcggcaaatccacacagcatcataatcatcatgccgaggtcgccgccgcggctcattagtaatattttaacgtattcaacgatatccgtggcgctgtagcctgttgaagcctggctggacggtaacactttgtgccccataatggcactgataatcagcaataacaggccaccgacaaataacacaccagtggcggaataccctttaatgatgtagcgagctacacccacaataaccacaaccccaataaggagctcaatgaatgtcagcataatttctcctgtctccaggccccaaagtaaataataaaaaattcctaaagcttaaggaaaaaatatgcccaataaattggcgatgaatgctgattaaaatcaataaaaactgccattaagacattgaagttgctgtttttatacatagataacaaaacgcatatttagcggttggcaattatcacataataatgtgtgcaaattgatggtggattgatgcaaatttgttaattgcaatggtgttagctgcggctgtgcgctcaaaaaataatctaacatgagcataggttgacgatatatattatatacttcgttaagatgattgttgtatctcgttaaaaaataaaataatttttccttgattgcattttgtcatcaaaaaagacttggtttttcttttttgactattcccatcgcagaaaacgacgcatcatctttaatcgatgcgcggaaatatttaacttgaacaagcggaaataaatagagcagctattcagattattctttatgttgggtctattaaggttatgttaattgtagctttgctatgctagtagtagatttttgataaatgttttatggtcacaaatgaacgtgagtaaatatgtcgctatcttttcctttgtttttattcagttaatcagcgttggtaaagtttttgctaacgcagatgagtggatgacaacgtttagagaaaatattgcacaaacctggcaacagcctgaacattatgatttatatattcctgccatcacctggcatgcacgtttcgcttacgacaaagaaaaaaccgatcgctataacgagcgaccgtggggtggcggttttggcctgtcgcgttgggatgaaaaaggaaactggcatggcctgtatgccatggcatttaaggactcgtggaacaaatgggaaccgattgccggatacggatgggaaagtacctagcgaccgctggcggatgaaaattttcatttaggtctgggattcaccgctggcgtaacggcacgcgataactggaattacatccctctcccggttctactgccattggcctccgtgggttatggcccagtgacttttcagatgacctacattccgggtacctacaacaatggcaatgtgtactttgcctggatgcgctttcagttttgagacaaatgaagttttagtaacttctttaaaatcaatagctaaaataagtaacatcaaaaataacgcgacttttatcactttttagtaaagttacactggacaaagcgtaccacaattggtgtactggtaaccgacacagcatttgtgtctatttttcatgtaaaggtaattttgatgtctaagattaaaggtaacgttaagtggtttaatgagtccaaaggattcggtttcattactccggaagacggcagcaaagacgtgttcgtacacttctctgcaatccagactaatggttttaaaactcttgctgaaggtcagcgcgtagagttcgaaatcactaacggtgccaaaggcccttctgctgcaaacgtaatcgctctgtaagatacgtcagcaagaattcaaaacccgcttaatcagcgggttttttttggtctttagtgtgcggttgaggccgaaaacagccagaatgccagtgcggtcatggcaaaagaccccagaaggttgacgaaaacgttcagtaatgcccagccaaagcggccctcttgtaacaaaaacaccacttctgccgaaaatgttgagaaggttgttagaccgccacaaaatccggtggtgattaatactttccacactggatcaatgttcgtcatcctgctgaaccatgcgaatcctattcctatgatgaatgccccaatcaggtttgctgtcagcgtccccaacggaatcgcctgatgcagtgggttaaatcgcatacttaacagccatctcgccacgcttcccgtaccaccgccaataaaaactgctaaaagaagttgtaacactgcaaaatcctgctatttgatttgtatgagtgataagtgtaacgccgaataatcgtcgttggcgaattttacgactctgacaggaggtggcaatgctggttgccgcaggacagtttgctgttacatctgtgtgggaaaagaacgctgagatttgtgcctcgttgatggcgcaggcggcggaaaacgacgtatcgctgtttgtcctgccggaagcattgctggcgcgcgatgatcatgatgcagatctatcggttaaatcagcacagctgctggaaggcgaattcctcggactttacggcgagaaagtaaacgtaacatgatgacgacaattctgacgattcatgttccttcaacgccggggcgcgcatggaatatgctggtggcacttcaggcaggaaacatcgtcgcccgttatgccaaactgcatctctatgatgcatttgccattcaggaatcacgccgtgttgatgctggtaatgaaatcgctccgttactggaggtggaagggatgaaggtcggtctgatgacctgttatgacttacgctttccagagctggcgctggcacaggcattacagggagctgaaatcctggtacttcctgccgcctgggttcgcgggccgctcaaagagcatcactggtcaacgttgcttgccgctcgtgcgctggataccacctgttatatggtggcggcgggggagtgcgggaacaaaaatatcggtcaaagccggattatagatccctttggcgtcaccattgcggcagcgtcagaaatgcctgcactcattatggcggaagtgacgcccgaacgtgtgcgtcaggtgcgcgcgcaactgcccgtcttaaacaaccgtcgctttgcgccgccgcaattattatgatgtttttttactcggcgcttgattcaccttgttacagattgctattgtgtgcgcgcgtcgaatgaccgttaatattctctggtttttaaggcgcgttctgttgccggttatatgtcaagaaggtatctatgggtgagattagtattaccaaactgctggtagttgcggcgctggtcgttctgctgtttgggactaagaagttacgtacgctgggcggagaccttggagcggccattaaagggttcaagaaggcgatgaatgatgacgatgctgcggcgaaaaaaggcgcagacgttgatcttcaggctgaaaagctctctcataaagagtgacgtggcgagcaggacgctccctcaatatcttgttcgatacaaaaaacccgcttcaaaaagcgggttttttatcagacagatgtaagtaattattacaggattacttaacttccatccctttcgcctgcaaatcggcgtggtaagaagagcggacaaacggaccgcatgcagcatgggtaaagcccatcgccagcgcttcggctttcatttcgtcgaactcatccgggctaacgtaacgttgaaccggcaggtgatggcggcttggctgcaaatattgccccagcgttaacatcgtcacaccatgacggcgcaggtcgcgcattacctcaataatttcttcattggtttcacccagtcccaccatcagaccagacttggtcgggatttccggatgcgcttctttaaagcgttccagcagcttcagcgaccagttgtaatctgcaccaggccgtacctgacggtaaatacgcggtacgttttccaggttatggttgaacacatctggtggcgttgcagtcagaatatccagagcacgatccatacgaccgcggaaatccggcaccagagtttcaattttgatttgcgggcttttttcccgaatggcagtaatgcaatccgcaaagtgctgggcaccgccatcgcgcaggtcatcacggtcaacggaggtgataaccacataacgcagcgccatatcggcaatggtctgagccagtttcactggttcattggcatcaggagctaccgggcgaccgtgggcaacatcacagaacggacaacggcgggtacaaatagcgccgaggatcataaacgttgctgtgccgtggttgaagcattccgccaggttagggcaggaggcttcctcgcagacagaatgcaggccatttttgcgcattgcggctttgatgccctggatacgtgtagagtccgctggaagcttgattttcatccattccggcttgcgcagcagggcttcgcgctctgttgccacgtttttaaccgggataagggccatcttatcggcatcgcggtatttaacaccgcgttccatcacaatgggtttactcatagcgtgcgtgttccagttgcgaattacgaaggaaagcgtttcaattcaatagattgttgtaattatcaactatttttgaattaacgactggcagtatatcattgaaacggacctgaaagcagccaaagcggtcgcgaaaatgtaaaattgttgttggattgtgccattttatcgttctgcgctgtgatctggctgtaacaatactttttcaaaatgcattacggataacatctattactccgtgcaggatgggatcacgcaggctgaatttgttgtagtggatagagaaatctatttgctcctcatttaaggacggaaaaggcagtttttccagcggccagcagcggctaaacaggttataaaaacggctgggaataatcgctaacatgtcactgttggcaaccagtgcagcgattgtcaaaatgttgtagctggtgaaattgatttgccggtccggaaacatttcttgaactctctgccgcagaccgctgaaattttgctcttccggtaacagaagtacatgcgcagcgttgtcgatagtctctctgtcatcttctaaagagagtagtggatttccctcgcggcaaattaacaccatattgtcggtgaacagaacatgatgttgcaccgtacgattggtgcaaaacatgttatcgatgatgagatcggtttgaaactgactgagttggttttccgcgtcgctgatgggcgggttgcgcagtaaaagctgcggatagtgagttttaatcgcccgatagatgacaggaaggaccagtgctccgaccgagggagtggtcgcaatagttatcgttcgttgcttatcatagcttccttcgatatccagcgcgccaagaatggactcaaggccctgactgatatactcatgtagatgcatcgcaaatgcggtaggagtgacaccctggcctttgcgaataaacaatgggtcagggaatataacgcgcagtttctgaatagactgactgattgccgagggggtcagattaagcactttcgctgcattaacgatccctttatgtacatatacagcttcaaaaatagtcagaaggttaagatcaatatttcgtaaggttgtaaatatttgtggtttaccttctgacgactttctgcttaaacagggttcaatttgattattactatccacgcacttactccaattttattcatggaaaaataatatttaaaaaattacaataatcttatgtctaattggaacggaacgcttttgctcaccataatcaactatttcaataggttaatcaatggggtgagttacggagcaaggcgtggcaccgcatttctgcaagtgataaagaaaatatacaaacgcgaaggagatgtaaagcattagcagatattatgagtaatgacccagtgtaaattgggccattgatgtatggaattaagcggtaatatattcgaagtccggattgtttagtagcgctaaaatattttccagtaaacgtggagcaatattattagtcgtcgcttcgggtttccattgtgatattttagccatttccattccggcatacccacaaggattaatacgtaaaaatggtgaaagatccatattgacgtttaatgccagaccgtggaatgaacaaccgcgtcgaatacgtaaacccagtgagcaaattttcttttccccaacatagacacctggcgcgtcagcccgaggatgcgcttctatacccagttcagccagggtattcaccactgtttgctcaagcaaggtcaccagttcacgcacaccgagtttacggcgtttcaggttaagcaacacatacatcacctgttgccccggcccgtgataagtcacctgcccaccgcgatcgctctggatcaccggaatatcacccggcattaaaatgtgctccgcttttcctgcctgaccttgggtgaataccggatagtgctcgaccagccagatttcatcaagggtactatcatcgcgggtatcggtgaattcatgcatagcctgggagattggctcgtaaggctgaagaccgagctggcggacaagaattttatcctgatacaaaacggcatctccgtggagaatgagtaaaagtgggggaaaagtatatcacagcgaggagaggggagttacccgaccaggagccgggtaacggagaagcgagttacagaaccatgcggacaatatcgattttgcccagttcttcatacagtgtttcaacctgctcgatatgagtggcgttgatagtgatagataccgagtggtagttgcctttgctgcttggttttaccgttggggtgtagtcacctggcgcatggcgctgtaccacttcaaccacctgatcaaccagctcaggtaacgcctgccccataactttgtaagtaaaaggagtagggaattcaagcagttcgttaagtttggttttcatgtcagctccggcgtaacgtaattaaatagcaactcccgccagaaggcgggagttttttactgatgcttagtatatggggacggaaattacactttcaagtgtttaatttttaaccaaaccagtgatggaacattaatttaatgtaatcaatgattttgccgaagaagttaccttccgggatttcttgcaacacaaccagcgggcgttgctcgatcgttttgccatcaagctggaagttgatagttccgacgacctgattcttttgcagcggcgcatgcaattcactgctgttcagcacatagctggctttcagatctttcatgcgaccacgcggaatggtcaggtacacgtctttatcaacccctaacgaagcgcgatcagaatcaccaaaccaaaccggttcagaggcgaactctttacctactttcagtgggttaacggtttcaaagaaacggaagccccaggttagcagttttttactttcggcttcacggcctttaaaagtacgtccgcccattaccgcagaaatcaagcgcatctggccttcagtcgcagaagcaacaaggttgtaacctgctttgtcagtgtgtccggttttgatgccgtcgacattcaggctgttatcccataacaggccgttacggttcagctggcgaataccgttaaacgtaaattctttttctttatagatcgagtattcattcggtacgtcacggatcaatgcctggccgatcagcgccatatctcgcgcggagctgtactgaccatcagcatccagaccatgtaccgtctggaagtgggtatttttcaggcccagtgcgttaacgtagctgttcatcaagccaacaaaagcgtcctggctaccagcggcaaaatcggccatggcgacacaagcatcgttacccgattgcaggttaataccgcggatcagctgagaaaccggaacctgcatgcccggtttgaggaacatcagcgaagaacctttaaacaccgggttaccggtggcccatgcgtcgttgccgatagtgactaaatcagtttctttaaatttaccggctttcattgcctggccgataacgtaactggtcatcattttggtcaggctggcaggatcgcggcggacatctgcgttctgttcggcgagcactttgccggagttatagtcaatcaggatgtaggactccgcatcgatctgcggtacacccgggatcatagttttgatattcaggtcatcggcatgtgcagcagagataaaggctgtgcaaagagccgtggtgagcgccaggcgcttcatgatacgagcggaaaaaatggtattcatggtctgaactacgacatccgtgatggaattaaaaaagtgccctactatagcaaatgcactaccggcaggcatctgactttccgcgtgactttgttaacgtcatttacagaaattgacacatcagatgcctgctttacgctactgcgcggtagtaataaatgactgtaattgggcttcggtttgcaaacgttgctgcaaggtactggcttcggctttgctggcgaatgggccaagctggatccgccagaccgcgccattttgagttacgcgaccggggacgccgaacttctgtcccagttgctgttggtactgttgcgcacgagcctgatcgcttacggccccgacttgcaccataaagttgccgctggcgctttgcgagacggcttgcggtgtcaccattgcaggcgaggttgcaggcgttgtcgacggagctgtaacaacgggctgtggcgcaggcgtcggttcgctgccttccagtacaccaggcgctaaggtcgttggtgcgccgaggaaaccgctgctggttaccggcgcgccggtcggatcttcgctttttagcgtcgaattactgaccggaagaatgtcaccctgcgggccagacactgaacttgttcccgcgccaccgcttaaatcgggaggtgcaggcagggcgtaagtctgtttggcgactgtggtacaagccataccaggaccagaaagcgaaccatcctgggcaacaataatcggatcgatacgaactttggtgttgtttgacgtgttaagacggtcagctgccgcgcgagaaagtgaaataacgcggtcgttgccgtaagggccgcgatcattaatgcgcaccacgatcattcgcccgttagccaggttagtgattctggcgtagctggggatcggaagcgttggatgggctgccgtcagctgtgtcggatcgaatgcttcgccagaggccgtcaggttactgccgggttcggcatcatagattgccgccagtcccgcctggctaaatcgagacggatcctgcacgattttgtagcttttaccgtcgcgctggtaatcctgatttgccgtcgcgttcagtggttcgaaacgcgggtccgccccgctaatttcaactatagggccgttacataccgcaggctgcggtacacttaccgtctgttgctgaccatcatcgcttgtacatgccgcgagcattcctgccgcgatgcagatcccgagccactgcttacgcattgcgcacctcttacacgcttttcgacaacattttcctgtgggtgtggattgacattacaatcccgaacccagccatcagcacaattagcgccgatcctccataactgaccagtgggagcggaacccctacaaccggcagaataccgcttaccataccaatatttacgaagacataaacgaataatatcagcattaagccgccagccatgacgcgaccaaaggtggtttgcgctctggcggctatccacagcccgcgcatgatcagcagaatgtagagagcgagcagaatcagaatgcccactaatcccagctcttccgccagtaccgcgaagataaagtcagtatggcgttcggggagaaattcaagctgtgactgagtgccgtgcagccagcctttgccgcgtaatccgccggagccaatagcaattttagactgaataatgtgatagcccgcgccgagtgggtctgattccgggtccaggagcatcattacgcgctggcgctggtaatcatgcatcaggaagaaccacagaatcggaatgaacgccgctaccagcactactgcgacgccaatcagacgccagctaaggccagagaggaacagtacaaacagaccggaaagcgcaacgaggattgatgttcccaggtcaggctgtgcagccaccagcagcgtgggcataaatatcagcaccagcgcgatgccagtgttcttcaacgatggcgggcaaacgtcgcggttgataaagcgcgcaaccatcagtggtacggctattttggcaatttccgacggctgaaaacgaacaataccgaggtccagccagcgttgagcacctttagagatggcaccgaaagcatctaccgccaccagcaaaataatacagatgatatagagatagggggcccagccttcataaacgcgtggaggaatttgcgccatcaccaccatgatgaccagacccatcgcgatttggccgattttacgctccatcatgccaatatcctgaccgctggcgctccagataaccagggcgctgtaaaccagcaatgccagtaagatcagcagcattgtgggatcgagatggactttatcccagaatgtttttttattcggattatccgtcatgattaatggtcctccgctgcggcaaccgctggattttccgcaggcagatcggtgttgttatcacccagcataatgtggtcgaggatctggcgcatcagtgtaccaaccgccggacccgcaccaccgttctccagaatcatggcgacagccacttgcggattgttgtatggcgcaaaggcggtcatcagtttgtggtcacgtaaacgctcggcaattttgtgcgcattataggtttcgttcgctttcagaccgaagacctgagcggtaccggatttcgccgcaattttgtacggtgcgctagcaaagtatttatgcgccgtaccgttagggcggttagcaacaccgtacataccgtctttcgccagctcccagtaaccggaatgaatatcgccgacgggcggttcatgcggctgtacccatggcacctgtttgccgtcttcggcggtgctcatcagcaaatgaggaaccttcacgataccgtcattaatcaggatcatcagtgccttactcatctggattggggtcgctgtccagtaaccctgaccgataccaaccggaatggtgtcaccctgataccacggttttttaaagcgtttctgtttccattcgcgggtaggcatgttgccggaacgttcttccgccaggtcgataccggtgtaatgaccataaccgaatttacccatccattcggagaggcgatcgatccccatatcgtaggccacctgatagaagaaggtatccgcagattcttccagcgatcttgtgacattcagacgcccgtggccccattttttccagtcacgataacgtttttccgaacctggcagttgccaccagcctgggtcaaacagcgtcgtattgcgcgtgatcaccccggcgctcaatgccgaaaccgccacatagggtttaactgtagacgcgggaggataaaccccctgtgtggcgcggttcaccagcggtgtattcggatcgttcaacaaggcggaataatctttgctggagataccgtcaacaaacaagtttgggtcataactaggcgtggaaaccagcgccagcaccccacctgtacgcggatcggtgactaccacagctgcgcggctacccgccagcagcgtttcaatatattgctggagtttgagatccagcgtcaggtaaatatcgtgtccggcttgcggtggtacttcttttaactggcgaataacacgcccacggttgttaacttcaacctcttcataaccggtctgaccgtgcagcacatcttcatagtaacgctcaatgcccagcttaccgatatcatgcgttgccgcatagttggccagtttgccgtcattattcaggcgttcgacgtctttatcgttgattttcgacacatagccgatgacgtgggtcaacgccgaaccgtaaggatagtaacgacgtttatagcctttaacttcgacacccggaaaacggtactgattgacggcaaagcgagctacttgtacttcggtcaggttagttttcaccggaatagaggtgaaacggtgtgaacgtgcgcgctcttttcggaatgcagcaatatcgtcatcggtcagatctaccacgctgcgcaaagcgtccagcgtttgctgcacgttatcgactttctccggcatcatttctatctggtagatagtgcggttgagggccagagggataccgttacgatcgtagataatgccgcggctgggcgcgataggcaccagcttaatgcggttttcattagagcgggtctggtagtcggtaaagcgaacaatttgcagattatacaggttggcgataagcacgccggtcagcagcaaaatccccaaaaaggcgaccagcgcccggcgcacaaacagcgcggactctgccgtatagtcgcgaaaagagttctgtagtttcatccgctgcgttttctactcaaagctcccttatcactcacggtgataaggatggttggtggtgatgctccacgcccggtacagactctctgcgaccagcacgcgaaccagcggatgggggagggtaagcgccgacagcgaccagctctgctcagccgccgctttacaggcaggcgacaacccttcaggcccgccaatcaatagactgacgtcgcgaccatccagcttccagcgttccagctcagcggctaactgcggcgtatcccagggcttgcctggaatatcgagggtgacaatgcggtttttgcctgcggccgccaacatctgctcaccctctttgtcgagtatgcgcttgatgtccgcattcttgccgcgttttccggccggaatttcaatcagctcgaagggcatatctttcggaaaacgacgcaggtactcggtaaaaccggtttgtacccagtccggcattttcgttcccacggcgacaagttgcagcttcacgcattaactccagagtttttccagttcatacaggcgacggctctcttcctgcatgacatggacaatcacatcgcccaaatccacgacaatccagtcggcgctgttttcaccttctacgccgagcggtaacaggcccgctgcgcgagactcctgcacaacgtggtcagcaatggacataacatgacggctggacgtacccgtacagatgatcatgcagtcggtgatgctggatttgccctgaacgtctaaggcgatgatgtcctgacctttgaggtcatcaattttgtcgataacaaaatcctggagtgctttaccctgcaagttttccccctgggtgaatcaaatagataaaaatggtctgtcagtatacctgaaccagaggcgatttcgggacaattgtcgccgaatcggctttcgaaagtgggctatcatcccaccccgcgccgcagattgcatcgccatttttgtaaaacaatttctacaaagtcgtgtctggcggaaaaagtctggctgcggagaatatcagcctgcccgggtctgtcaatggtcgttgcggcttacccgtaaaaaaacagaaaagtcatgcattctcgaccccgatggcacggctattgaggacgcgtagcgtcgcgaatttttggttgatatcaatggcgctccaacacccctggtcaacgcgaaaatgccacatagcctcggcaggcatgccaattaaacgggcgattaacagactcagtacaccctgatggctgacgactaaaatattctgatagtgctgaaattcactaagccttgcgataaagcgttccacacgttgcgaaaatgcctgaaatccttcaccgttcgtggggattgcatgctgccagtcattgcaccacgcgctatagttttcggcatcttcttgcatgaggtcgcgatgatgtcgcatctcccagtcgccaaaaaacatttcgttgagttcaggtatgatttgcacggggagctggcggtcactgagaaccagtcgcgcggtatgctgtgcccgttccagttcactgcataaaaccagatcaaaggaaacaccatgtagcagcgtatgcagattttgcgcttgctcaataccgcgcgcggtcaggggggtgggcgcatgaccgctgtaaagaccatcgatattcgcttgcgtttcaccatgacgaattaaccacagtcgcatcatgccctccgtaacgacaggtatcagcgatacaagccttgttggttaatgtaagtcagtaccggttccggcaataaatcctcacatgattcaccgttttgcaaacgttcgcggatgatggtcgccgagatgttaaaccacggcgtttcagccagataaattttaccggcaggctgaaggtgaagatcttccgggttatgtgtcaaatgatcttccagccattgctggtattgcggttgcgccatttcaagtgggtaacctggacgccgacagacgatcaaatgtgcattgtcgagtatcgtttcgtattcgtaccaggtcggaaaggtcagcagtgaatcctgaccaataataaacgccagcggcacgtccggtccttgttcctgccgccactctttcagtgtttgcgcagtgtaagagggggcattgcgctttagctcgcgttcatcaagagtaaataatggcttgtcggcaatcgccagttcaagcatgtgtttacgctgcacgctgttcgcttccggctggggacgatgcggaggaacattattagggatgattgtgacccgcgtcagaccaatcaaattcgccagcgtttccacgggttttagatgaccatagtgcaccggatcaaaggtgccgccaaacagagcctgtaaagatttcatatcaaccgtcgataaatacgtccgccaggggtttatggcacaacagaagagataacccttccagctctgcccacactgactgaccgtaatcttgtttgagggtgagttccgttcgtgtcaggagttgcacggcctgacgtaactgcgtctgacttaagcgatttaacgcctcgcccatcatgccccggcggttctgccatacccgatgcttatcaaacaacgcacgcagtggcgtatgggcagactggcgtttcaggttaaccagtaacaacagttcacgttgtaatgtgcgcaacaaaataaccggttcgctgccttccagacgcagttgctgaagaatatgcaatgcgcgcttactttttcccatcaacaaagcatcaacccaatgaaaaggggtgaaatgcgcggcatcattcaccgcctgttcaacgcgcggtaatgtcaatttgccgtctggccagagcagcgataaacgctccagtgcctgagccagcgccagcaggttaccttcataacagtagcagagcacctgatttgccgcgtcatccagttctaagttgagctgttttgcgcgcgcagcaacccagcggggaagctgagcctgctccggtgtctgacaggtcacctgcacgctgcgattcgcaagcgcagtaaaccaggcggcattttcttgcgctttgcttaatttattaccgcggacgatcaactgcaggtcgtcatgcagaagtccggtgagtgtgagaagttgctcattgatcgccgcattcggtccgttttctggtaacaacagcaatagcgtttgtcgactggcaaacagactcatagcctggcataacgaaaagatcgcattccagtcagtgttgggatcaatggaaaaagtgtggtgttcttcgaatccttgtgccgcagctacctgacgaacagcgtcctggctttcctgcaataacagaggatcgttaccaagtaaaagatacgccgcgcgcagcccttcattgagctgcgcgcggagttgttccgggtacaaccgaatcatcagttacccagcgtggtggagacgcgtgcaggtgttgccggagtatccgttgtggtcgacgtctgttcttcgtcggaacgaatatccgcagcacggatgcttggcagcttacgaatcagctgttcggcagcacggtcgtacatctcttttacgatcatgtcttgttcgttatctttcgctaacgccatttgcgggttatcgaagaacgaacggaagactttggcgctaatcgggtagatatcacggccggggatcaacacggtcgcattaaccgtcatgatcatctgatactctgctgtttgaccgttacggaataccgatgcggtatctttcgcgatgctcactttacccaaacgcaaggatggaacgtccttacgcgtggtttctttatcaagcaactcgacaccattcagacgtaactggttacgcaccgcacggcttaatggcccgttcggatcgcctgagtccaggatcatgaccttcatagtggaaggaacctgcgtggtatcacgcagatgccagccacacccggcggtgattaacaccgccagagataacaacaatgttgccagatatcgcacgcttcctcccgcgcttagccaacgaccagattgaggagtttacctggtacgtaaatcactttacgtacagtaacgccatcaagatattttgctaccagatgttcctggccagcacgttcgcgaacctgttcttccgttgcgtccaccggaacggtgattttggcacggactttaccgttaacctgcaccacgaccagcgtggagtcttccaccatcgctttttcgtcagcaaccggccacggcgcgttgtcgatatcgccttcgcctttcagttcctgccacagcgtgaagcagatgtgcggggtgaacgggttaagcatacggacaacggccagcagtgcttcctgcatcagagcgcgatcctgctcgccatcggttggtgctttcgccagtttgttcatcagctccataatcgccgcaattgcggtgttgaaggtctgacgacggccgatatcatcggtcactttagcgatcgttttatgcacatcgcgacgcagcgctttctgattttcagtcagcgcatcaacgttcagtgccgcaacatcaccttttgctgtgtgctcgtaaaccagtttccagacacgtttcaggaagcggttagccccttccacaccggattcctgccattcgagagtcatatcagccggagaagcaaacatcataaacagacgaacggtgtccgcgccgtaacgttcaaccatcacctgcgggtcgataccgttgttcttcgacttggacattttgctcatgccggtataaaccagttcatggcctgccgcatctttcgctttcacgatacggcctttctcgtcacgttcaacgatagcatcaaccggggaaacccagttacgttcgccgttttcgccaacatagtagaaggcatctgccagcaccataccctgacacagcaactgtttcgctggttcgtcagagttcaccatgcctgcatcacgcatcagtttgtggaagaagcggaagtagagcaggtgcataatggcgtgttcaataccaccaatgtagatatccaccggcagccagtagttagccgcttcggaatccagcataccttctttgtactgcgggcaagtgtagcgcgcatagtaccaggaggactccataaaggtgtcgaaagtgtcggtttcacgcagtgctggcataccgttaacggtagttttcgcccactccggatctgctttaatcgggctggtaatgccgtccattaccacatcttccggcaggatcaccggcagctggtcgtccggggtcggcattacggtaccgtcttccagcgtcaccatcggaatcggcgcgccccagtaacgctgacgggaaacaccccagtcgcgcaggcggtagttcactttacgctcgccaacgcccatcgcagtcagtttatcggcgatggcgttgaaggccgcttcatggtcaagaccgttgaactcgccagagttgaacagcacgcctttttcagtcagggcttgctgagaaagatctggctcagagccgtcagctgccaggataaccggtttgatgttcaggccgtatttagaggcaaactcgtagtcgcgctggtcgtgccccggtaccgccataactgcgcccgtgccgtactccatcaatacgaagtttgctgcccaaacgggaatttcttcgcccgttaatgggtgaaccgctttaaagccagtatcgacgccttttttctccatcgtcgccatttcagcttcggcaactttggtgttacggcattcgtcaataaaggccgccagttcaggattattttccgccgctttctgcgccagcggatgacccgcagctaccgccaggtaggtacaacccataaaggtgtccgggcgggtagtgtaaacggtcagcgtgttgtcatagtcgttaacgttgaaggtgatctccacgccttcggaacgaccgatccagttacgctgcatggttttaacggtgtctggccagtgatccagtttatccagatcgttgagcagctcgtcagcgtaagcagtgattttgataaaccactgcgggatctctttacgttcaactttagtatcgcagcgccagcagcagccgtcgataacttgttcgttcgccagtacggtctggtcgttcgggcaccagttgaccgcagaagtcttcttatataccaggccttttttatacagctcggtgaagaatttctgttcccaacggtagtattccggcgtacaggttgccagctcgcggctccagtcataaccaaagcccagcattttgagctggtttttcatatacgcgatgttgtcgtacgtccacggtgccggagcggtgttgtttttcaccgccgcgccttccgcaggcagaccaaacgcgtcccagccgatcggctgcaggacgtttttgcccagcatacgctggtagcgggcgatcacgtcaccgatggtgtagttacgtacgtggcccatgtgtagtcgaccagaaggatagggaagcatagacaggcagtaatacttctctttgctctcgtcttcggttacttcaaatgtgcgcttctcatcccaatgaagctgtactttggattctatctcttccgggcggtattgctcttgcatggcagccagtggtcctgttttcaatacggctacaaatgtagcgttgaggtggtttttcagatccgcatagcatagcccaaacgtccgcgtcaaaacagcctttcgcgcactcgacgttgaaatgatgcccggattattcatacattaatttacagagtttgtgggcgtattagcaaagcaaggaacaaagaacgtctattattatagtcagttaacgacccgggagatgaaacgatgaacaaggttgctcaatattaccgtgaactggttgcgtcactgagcgaacgcctgcgcaatggcgaacgtgatatcgacgcactggtggaacaggcgcgcgagcgcgtaataaaaacaggggagttaacgcgaaccgaggtcgatgagctgacgcgagctgtcagacgtgacctggaagagttcgccatgagctatgaagagagcctgaaagaagaatctgacagcgtctttatgcgggtgattaaagaaagcttgtggcaggagctggcagacatcaccgataaaacgcagcttgaatggcgcgaagttttccaggacctcaatcatcatggggtttatcacagcggagaagtggtcgggctgggaaatctggtctgcgagaaatgtcacttccatctcccgatctacacaccggaagtgctgacgctatgcccgaaatgtggtcatgaccagttccagagacgcccgtttgagccgtaatagtctgatttcgcacagcaataaagagaatatgggccgaatgaaattccccggcccttgtttttatctctacagtaaatcttcagtctcacgaatttcctgactgacatctctggttccggatgactgaactttacgatacaggtcgagagcctgtcggagatcgacaggtcttccttctccgtagtgatacataatggccaggttataccaggcagtggcgtcattgcattcagcggctttcgtaaaccattcaaaggcagcctgataatctttctcaacgccttgtccgtgtttatacatataaccgatgttgacgtaagcgccgacgctcccctgagcggcagccttcagataccagtacatcgcttgcttatagtcctggtccaccccttcgccagcgttataatcccatgcaatttgaaactgggcgtgccgattaccctgctgtgcgcttttcaaataccagaatgcggcgagtgtcttgttttgagcaacgccttttccgtcttcataaagatcggccagattgttttgcgcgtcactatggccttgtaatgcagcttgtttgtaccagaaaaatgccagcgcatagtcttttgcgactccgttgccatttctgtacatccacccaagattattttgcgcataagacattccgctctccgcggctatctgataccagacaaccgcttctttataattgggggcttctccacgatccagtgtccagccaagggcgttggaagcgaaagtatggccttgtagggcagcttttttcagccagaagatggcttgctcattatctttatgacggcttttatcctcggtatacttttgccctaaggaatactgtgcttcacaatgaccttgctcagcggccagcttcagccagtaaaaggctttttcgtcgtccggagaatcaattgcgctatcgcgattataataaaacccaacaatatattgagcctcgcaatcgcctttttcagcacgttcgataatctcatctattgataaattatcgcagcaacttgacgtgaaaatcattatcatttccttatggttgcagataaaacatattatatttttatgtgttccatttttgcgtaagccttattttatgcgtattatgtcgcgtcagaaaagtataaataaacgagcctcgcaatgcggctaatattcatttaatgaatatttaaggataaattatatggacatggagtcgcaaaaaatattgtttgcactttccactccgatggaaatacgcaatgaatgctgtttaccttcgcattcatcacccaaaatgtatttaggtacatgcttttttgacctttcttcctcatggggaattgatgaccgtgatgacctgctgcgcacaattcaccgaatgatcgataacggtcatgccgctcggttggcagggttttatcaccgctggtttcgttattcgccatgtgaatggcgtgactatcttgctgaactaaatgagcaaggtcaggcttatgcgcaatttgtcgccagcaccgccgaatgctgtggcgaagggggaatcaaagcctgggattatgtccggatgggttttttaagccgaatgggcgtacttaataactggttgagcgaagaagaaagtctatggatccagtcgcgcattcatctacgggctctacgttattatagtaactggcggcaatactttgccggttatacctttggtcggcaatattggcagtctcccgaagatgatcatctgcctttattacgcgaattcttagcgcgtaaagaatacgacgattccggcaatgatatgttttatcaattatttgccagtgatgatgcgtattaccctaccttgtcctggcaaccattggcttactattctgcatgcccggaaacgcttaaggatatgagcgacctatgaaaaattgctggaagatcctcgatatagaggaaacgactgacgtcgatattatccgccgcgcttatctggcgctgttaccgtcctttcatccagaaaccgatccgcagggttttaaacaacttcgtcaggcgtatgaggaggcgctacggattgcgcagtcgcctgctaaatctgtttggcaaccagaagaatatgaggtagcagaacatgaaattctgctcgcctttcgtgcgttacttgcctctgatagtgaacgttttctgccctccgcctggcagcgattcattcagcaattaaattattgctcgatggaggagattgatgaattacgctggtcgctgtgcacaatcgccatgaacactgcccatttatccttcgagtgcgtggtgttattagcagaaagattgcggtggttacaggaggaaaataccggggaaatagacgaagaagaactggaatcctttttatatgccattgcgaaggggaatgtttttaacttccagaccattctgcatctgcccgttgccgtgcaaaatgacaccatcgatttttaccaaatgttcgctcggatttggtcatcgcatccacaatggctgacattgtatttagcgcaacatcgcgcagtgattatccccgatgatgcaaaactgcacagaaatttactccgctggtatagcgcaggtcgcctggatatccccgaacttctggattacgcccagtcatggcgggaaactgaacctgataatgaagatgcgccttattatgaatacgcgcaacgcgtctattgtggagaaggcgaaagcctgttggcagaactttgtgactactggcgcgagtatccctccacccaggcggatgctttaatgttgcaatggtgccgtcagcatcgggtcgattattacccattactggtgatgatgattgaagcgcgtgatctggttaacgatcagggaaaaccgctactttatgtccccggcgacagcgcccgtacgcgttttcatttatacgaaatactcagcgatgaaaaactctctgcgctggggcgttcactggtcgagatggttttgcacaaaggacgtaagccgcggatctcactcacgcgtgatacagaacataccttatggccattatatctagttgccaaacaattagtgcaggcctgccaacctacagaagaatcattaatgccgattgtgagccgccttgatgcagaaaatcgttgtccactggaagcattaattattcgtcgattattaattcaggcggcgaattttaccgagaagcaaactgttgaaccggagccgcaaccgcagccaatgcccgttgacgatggtgggccaggctgtctgggcatcattaaaattattttctatatttttatctttgctggtttgatagggaaaatactccatctgttcgggtgacagtcgacgttaatgtgcgggaagcccggcaagtaatctttccgcatttttgtaatgttgtttggcggccagttttaaccatttttgagattcataatggttaacattaatacctgagccatttctgtagatcaaacctaaagtatattgagcatgagcatacccttgttcagctgcttccttataccagagaattgctttacgggtgtcgggtttgacccccagacctttgaggtagatccaccccagtttactttgcgcgcgtggattttcctgttccgctgattgctcataccagtatctcgcctgtgtataatccagtggtttaccgtcgctaccatgaagataaaattctccaaggcgatattgcgacgttgagtgaccatgaatcgcggaaagctccgtggctgccgtggtgaatggaagactgcccggtgagcttaaataatcaaaggcataattcaccatggctttatcacgcaacgtcgttttcttgggttggctaatacaggtaattgctgcaactataaaaattgcgaatatatacattaattttttattcatgtgtgaatgcttcgattttctttttattttgaaagcgtcaagtttatactcatcaataataaaaaagtagtcagttaatgcacttaagggattattaacaaatgaataaggaagaacaatatcttctttttgcgctttctgcgcccatggaaatacttaatcagggttgcaaacccgcgcatgactcgccaaaaatgtatactgggataaaagaattcgagctctcatcatcctggggaataaataatcgtgatgatttaattcagactatttatcagatgactgatgatggtcatgccaatgatttagctggcttatatctgacatggcatcgctcttcccctgaagagtggaaagcattaattgctggtggctcggagagagggttgatttatacccaattcgttgcccaaaccgctatgtgctgtggggaagggggaatcaaagcctgggattatgttcgaatggggtttctgtcacgggtcggtgtgctcaacaagtggctgacggaagaagagagtttatggctgcaatcgcgcgtctatgtacgagctcaccattactatcacagctggatgcactatttttccgcctattcgttaggacgtctctactggcaatcttctcagtgcgaagacaacacttcgctacgcgaggcgctaaccctgtacaaatacgatagcgccgggagtcgtatgttcgaagagctggcagcgggaagcgatcgtttctatgccacgcttccctggcagccattaactgtccagtctgaatgcccggtaacgcttaaggatgtgagcgacctatgaaaacatgttggcaaatcctcgaaattgaaagcacgacgcaaatagacattatccgccaggcttatcttgctcgcttaccgttgtgtcatcccgaaaccgatccgcaagggtttaaagcattacgccaggcctatgaagaggccctgcgactggcggtaaatcctgtcgaggaagcagatgatgaagaaaaagatgctgccgctgaacatgaaatactacgtgcattcaggacattactggattcagaaagtgatcgttttcagccttccgcctggcagaaatttattcagcaattaaatacctggaacatggaggatgtcgatcaattacgctggccgctgtgtgcaatcgccatagaagcgcgatatctttcattaaattgtgcttctttgctggcagagcgtttgaactggcattcatttaatgacagcgaaggaatggatgaggaagaaagggaggcttttcttgaggccattcaggctggtgattgtttcgatttccttagccttctggaatatcccattgcgttgcagaaccagactgttgagtattacttcgcgctggaacgttgctgccgttaccatcctgactatgtcactgcgtttttggcgatggaaggtccgtggttaattcctgatgatgcaaagttacatcgcaaactgttgcgctggtacagctcggtgcaaacaggtatggcggaactcattcctgtcgctcaacagtggcaaacggaagaaccagaaagcgaagatgcccggtattacttgtgtgcacaacgtttgtactgcggcgagggggaaagcctgcttgccgatctctgcgcgtactgggaaagttacccatctacacaagctgataatttgttgttgcagtggagcaagcgtcattgcccggattatttcgcgttattagtgatggttatcgaagcgcggagcatggtagatgcgcaaggtcaaccgctgaaatatgttcctggtgagagcgcccggacgcggctgttatgggcggagattttacatagcggaaaattatcgccgttaggtcaatcgtttattgagtcgttattcttcaagcgcaaagcatgggcgtggtggaaatcgagagtcggtagcgagacagagcaagattcaccgttcctggatttgtatcgggtagcggaacaggtagtacttgaagcgtttccgaaacaagagatgctggcccgtcttaatacaaggctggaaggcggagatgctcatccattagaggccattgtcacccggatgcttttgacgaaagtgaaactcgagccggaggatgaagatgtcgatgagccaacacctgaaaatcatgaagaaaaaaatgatgagggtgaaaaaccacagagcattaccagcattatcaaaatcagtttaacggtgctggtgataggttatgctctcggcaaaatcgcgatgttgtttagctgacgatgtgttttttgcgccgatgccggatgcagcgtttacgccgcatccggcagccgtgtttatgggatctcaatggctaaataatcgctcgcccgccgccgaacttcatccacgcgggccatatcgtttgactgcaacgccgcatcaaaatcggtgatcacccggccgatctcttctcgctcgtcacccagcgcccgcgcccacaactcttccagtttggctttaaaggtgcgattgatgagcatatcgcgcggataaattttcaatgcggataaccgcgtccgactctcttcaatctgctgcgcgctcaatgttaccgggctgtggttaatcactctggacttaacgctgccgtcttccagaagcacgtcaacttcaagcaacccgttgatatcataactaaagcgaatatcaatcgactgataagccccggttttcttcaacggcacatcgaaggattccaccagaatgttgtttttaactttgtggttttctccctgatagacgttaaccgtaattgaatcctgttccgggtgcatggttgaataagtttctacacgcgacacgggcacagtggtgtttcgttcaataatcggcgagaaaatgccggaaacgccctggcggttaacttcaacgcccaacgagtaagggcaaatatcagtgaggattacctcttcaatatcttcactgcgtaagcggcaggcggcctggattgctgcgcccagcgcgacaatggtgctcggatcgtaactttgatacggtaatttgccaaacagacgcacggcgattcgctgcaccagcggcatttgtgacgcgccgccaaccagcaccagactgtcgatttgactcggcttcagacgcgcatcgcgcaacgcctgttcaatcggcactcgcaagcgattgagcagcggcaaccacaaatcttccagttcgttctcgtaaaattcgcattcccgcgtttcttcctgatactgccagcgaatgtgcaatggcgattgattgctacattttgccgcttccacacaggcgtacaaggctgccagttcactctcgttaagcgtggtcctggcgacatccgcgcgttttaaaacctcatcgaccagcatatgggtaaaatcttcgccaccaagaaagttgtcgccagcggaggcgtgaacttcaatcaccggcgtggcgtactcaagcaccgtaacgtcaaacgtgccgccaccgagatcaaacaccagcgaacgggtattttgttgggtatgcaggccatacgccatcgcagctgctgtgggttcattaattaagcgtaccgcatttaacccggctaactccgctgctaaacgggtatgcttgcgttgttcatcgctgaaataagccggaacggagatcaccacatctttaatcggacgttgcagaaattcttcggcatcttcttttaatgagcgtaataccaaagaggacagttctggcgcgttaaatgtgtcgctgcctaaccgccagttggtattactgcccattgcacgtttaaataacgctgccgttttatccggatgcgaagtacgccgtgatacagccggttttccgactaaaatatgattattttcatccatgctaattatggatggtgttaaatattcaccgaacttatttggaattaattgcgcggcaccgtctttccagacggcaattaaactattggtagtaccgagatcgataccaatggcgagttctgcattatccattgcatttatatcttgaaagaaaaagagataaacagattaagaccacccaggtaacgcgtggtgatcttaatcaatgacgtgtgttaagcgtaaaatttcagacgatcagccagtaaatcaacaaagccctgacgatcaacatcgaccattacggtggcattcggtttattgcctgtcagataataataatcaacaaccgtcataccctgggtatatttcccctgtgtttccacgccaacccagcgctcaacagaggtaaataactccggtttcaacagccaggcgatggtgcatgggtcatgcagtggtgcgccgacaaagccccatttttcgtctttatgatattcgaggaagaaatccagcagttcggcaacaatggttgaaacagggttaccaatcgcgcggaaacgctcggtgtcttcaacgtggatttgtgctttatgagtaacatccagaccggccatcaccaccgggatccctgactggaagacaatttctgccgcttccgggtcaacgtaaatattaaattcagccgcaggcgtccagttacccagccccatagcgccacccataatcacgatacgggcaattttgctatgcagttccggatggctattgagcagcaaggcaacgttagtttgcggtccggtagacacaatggtgacaggttccgcactttcacgcagcgttttcgccatcagctctaccgccgtacagttttgcggtgcgaatgtcggttccggtaatgccgggccgtcgagaccgctttcgccgtgcacattgtccgcgataatcaactcacgcattaacggttttaccgcgccgcctgctaccggaatatcggtgcgattaagcaaggtcagcatacgcagaacattgcgtaaggttttttctggtgtctggtttccggcggaagacgtaattgctttgacatcaagctctggtgaggcgagggcgagaactattgcgatagcgtcgtcatgacctgggtcgcaatctaacagaattggcagtgccattgttgctccttgttgtgtgcttctttgcgacaagggtaacgccaggatgtaacagatacgaggggcgaaacgataaagcgtgagatggcgcgcaattgggtatgcgcgccagagtgattaatgcaggattttcgcgaggaagtcttttgcgcggtccgatttcggatcatcgaagaaagcgtctttcggcgagtcttcgacaattttaccctcgtccataaagatcacccgattcgccactttacgggcaaagcccatttcgtgggtcaccaccatcatggtcattccttcgttcgccagttccaccatcacgtccagtacttcgttgatcatctccggatccagcgccgatgtcggttcgtcaaacagcatcgcaataggatccatacacaacgcgcgagcgattgccacacgctgctgctgaccgccggaaagctgcgccggaaacttattggcgtgagcagaaagcccgacacgctccagcagtttcagggctttttcacgagccggcgctttatcgcgtttaagcactttcacctgcgccagggtcaggttttcgataatcgacagatgagggaacagctcgaaatgctggaataccatcccgacgcgggaacgcagctttgccagatcggttttcttgtcgttaaccacgataccatcgacggtgatttcaccttgctgcaccggttcgaggccgttgacggttttaatcagcgttgatttgccggaaccagacgggccgcaaaccaccaccacttcgccttttttcacttcggttgagcagtcggtcagcacctgaaagtgaccataccattttgaaacatttttcagggtaatcattatgctgtccttcttttcaagtagctgaccaacaacgacgcgctaagactaataacgaaataaacaaatccggcaaacaggatcatctcaacctgcgtaccatcacgctcaccaatggttgaggcggtacggaagaaatcggccagggataacacatacaccagtgaggtatcctggaacagtacgatgccctgagtgagcagcagcggcaccatcgcgcggaacgcctgcggcagaataatcagtttcatcgactgccagtgagtcattcccaacgccagcgcggcgctcgattgaccacgagaaatactttgaataccagcacggataatctctgaatagtaggccgcttcaaacatcgaaaacgccaccatcgccgaaattaaacggatatcattttttggcgataatcccagcacgttttgcagaaaacccggcacgatcaggtaaaaccacagcaaaaccataactaaaggaatcgagcggaatacgttaacgtaggctttggcaaaccacgccacgggcgcaaagctggataaacgcatcaccgccagcatcgtgccccacaaaataccaatcactaccgccatgacggtgattttcagggtgatcaccagcccgtcgagcagatatggcagggaagggacaatggaactccagtcaaactcgtacattatttgccccccatgttgccaggcaggcgaactttacgttcaaccagcgtcatcaccagcatgataaaagcgttaatcaacacatacgccagcgtaatggcggtaaacgactcccaggcatgggctgagtaatcgagcaatttacccgcctgcgccgccatatccaccagaccgatagtcgaggcgatggcggagtttttcaccaggttcatcatctctgaggtcatcggcgggacgataacgcgataagcattaggcagcagtacgtatcgataagcctgcggtagcgtcaggcccatcgccagcgcggcatttttttgccctcgcggcagcgactgaatcgcggcgcgtacctgttcgcaaacacgggcggcggtaaacagccccaggcagagcatggatgaaaggaaaaactgaatattgggatccagctcggccttaaaccacatgccgattttctccggcagcagctccgggatcaccagataccaggtaaagaattgcacaatcaacggcacgttgcggaacagttcgacatacaacgtacccagaccagagagaaaacggtttggaacggtacgtaaaatgccgaaaaatgaaccgacgaggaaagcgataatccaggcgcagatcgacaaagcgatcgtcacctgaaaaccactccagatccaaccaagataggtggtgttgccgaacggggcttgttgtaaaaaaataccccagttccagtctatagacataaatctactccagaaaaaagagggtagcagcgttaactgctaccctcgaagattgttacccagcgtattgcggttttcaggcccgatggggaacgaccatcaggcgtatagtctgtccgtgctacgtaacaatcgagagggctggaatttccgcccctggttcttgtaattagttcagtgccttgtcattcggttctttgaacagtgctttcatttcgtctgacagttcgaaattcatgttcaggtttttcggcggaattggatttttgaaccacttatcaaaccatttttccgcttcaccggaggtctgcacctgagcgatggtgtcatccatcagctttttgaactgcggatcatctttacgcaacatacaaccgtaggcctcctgagactgcggcttgccgacgatttcccagttgtctggtttcttcgctttcgcacgttcaccggccagcagagcgtcatccatcataaaggcaacggcacgaccgctttccagggtgcggaaagagtcaccgtgatctttggcgctgatgatgcgcatattcattttttgctcttcattcagtttgttgagcaaaacttcagaggtagtgccggaagtgacgactacggctttgtctttcaggttggcaaaatctttgatatcgccaccctttttggtcaacaggcgcgtaccgaccacgaaaatagtgtcagagaaagccgcctgtttttggcgttcgacgttgttggtggtagaaccacattcaaaatcgaaagtgccgttttgcagcagtggaatacggttttgtgaggtaatcggaatcagttttacctgcaagtccggtttgttgagtttctttttcactgcttcaacaatggcgttggagtaatcctgcgagtaacccaccactttttgctgattgtcgtaataagagaaaggcactgaagattcacggtgaccgacgacaatcacaccgtttttggcgattttgtccagagtactgcccgctgccggggcggcgtcatctgcctgtgccagtcctgcggaaagcgccagggcgaggattgctgtggcaggtttacgtaattgcatatccaactcctttatcttctgcgttaagaacgcatggatacccgttgtgagtgtttgtgttgttatcgtctgcaactttattgtgcagtgttgtgcctgttaggtaacatttagtttggctaaatgtaaagatattgctgttttattgtttgtttttgcgagatgcgccgcaccattccgaagcaaaattcttaaaatgcactcttttagtgctaccgctggattactgtggtgcaactaggttgtactgatgctgattcagggtttgccttgtataacaaagcaatagatgtgccaaagttggataggagaatattgttatccggataatgcactgatgccgcatccggtgagcgtgccgaaatatgggatgtattccggcacgataagaagggattatttacgtcgctgacgcagactcatcaacacagcagcaaaaccaaacaatgccgtcagcacccacagcggccagttgccggtacgtgcgtatggtgtgagtccggtggtcggcgtcacgttagtggttaacacctcgcgggtgaactgcgggatcatcgcctgaatctcaccctgcgggccaatcaccgccgtaatgccgttgttggtgctgcgcaacagtgggcgcgccagctccagcgcacgcattcgcgccatctggaagtgttgccatggaccaatagatttaccaaaccacgcatcgttggagatagtcagcagatagtcggtatccgggcggaagttatcgcgcacttgctcgccgagaatgatctcgtagcaaatagccgcagtaagctcaataccatttgccgacagcggcggctggatatatggcccacggctgaacgacgacatcggcagatcaaagaacggtgctaacggacgcagaatcgactccagcgggacaaactcgccaaacggcaccagatggtttttgttatagcgatcggctgattcgtagctgtacggcgcacctttacccagcgtgatgatggtgttgtaggtatcgtagcggttctgcttattgagacgcgcgtcgacaatcccggttaccagcgagctacctttatcacgcaactcaccgtccagtgctttgaggaacggttgctgattaatttccagatcggttatcgccgactccggccagataatcaacgatgatttgcccatcagcggtgccgttgcgttgtagtaaatcttcagcgtattaagaagctggccttcgtcccatttcagcgattgcggaatatcgccctgaaccatcgaaacctgaatggttttctccggttgtggggtaaaccactggatgtaacgcagcgggaagggaagggcaaacagcacgacggccaccaccagcggacgccagttgcgtttgaccaacgccagtgccagcaggccactaaccatcatcagcaggaagttaatggcttccacgcccattatcggtgccagcccttttaacgggccatcaatctggctatagccgaactgtaaccacgggaagccggtcagtacccaaccgcgcagaaactcggtcacttgccagagggcaggggcggcaatcgctacgcgcagccaggtggttttcggccacagacgcgacagcacgccagcaaacagtccggtatacagcgacaaatacgccgccagcagcaccactaggaagatgttaaccgggccaggcattccgccaaaggtcgcgatgctgacatagacccagttaataccgctgccaaagaggccaaatccccagcaaaagccaatagcggcagactggagtggacggcggttaaaggtcaacgcctgaagccccatcagcgaaataatcgccgcaggccagacgtcgtaaggagagaaggccagcgttccgcaggcaccgaataataacgccagcagcaggcgaatgcgctggcgttcaattaatgaggcaaaagccatgtagttatctatccagtttcggttttattcatccagcttcggctggggtgagtcatccgggattttgacatgaacctgaataatacgccgactgtcggccatcgccactttgaactggtaaccgtcgatgtcgatagtttcgccacgcgccggaagatgcccaaatgcctgcatcaccagaccaccgatagtgtcgacttcttcatcgctaaagtgggtgccgaacgcttcgttgaagtcttcaatggaagccagtgcgcgtacggtccaggtatgacgactcagctgacggaagtcgatatcatcttcttcgtcatactcgtcttcaatctcaccaacaatcagttccaggatgtcttcaatggtcaccagaccggaaaccccaccgaattcgtcaataacgatcgccatgtggtaacgctgagagcgaaactctttcagcatccggtctacgcgcttactttcaggaacgacaaccgcctgacgtaacactttgtccatgctgaaggcttcagcatcgctgcgcataaacggcagcaagtctttcgccatcagaatcccttcaatgtgatctttgtcttcgctaatcaccgggaaacgtgagtgggcggactcgatgatgacatcaagacattcgtccagcgtctggttgcgtttcagggtaatcatctgggagcgggggatcatgatgtcgcgaacgcgttggtctgcgatgtccatcaccccttcgagcatatcgcgcgtatcttcgtcgataaggtcgttctgcccggaatcacggatcagcgccagcagttcgtcacggtttttcggttcaccgtggaaaagttggctgagtaacagggagaaaaatcccttcttgttgcttatcgtgtcactactgtgtgaattgtcgtcgctcatggcgtcgtatgggttctcatgttagttaatcaaaacgccgtcgttaatcaccaacggcggggacgtctgccagtcaaatgcctggcaaattattctttctcggcaatgtacggatcctcatagcccagagcaagcataatctctgtttcgagggcttccatttcttctgcttcgtcatcttcgatgtgatcgtaacctaacaaatgcagactgccgtgcaccaccatatgcgcccagtgcgcctccagtggtttgccttgctcctgagcttccttctcaaccacctgacggcagataaccagatcgcccagtagcgacatttccatgccaggcggcacttcaaacgggaaggagagcacgttggtcggcttatccttaccgcgataggtcagattcagactgtggctttcggcggtatcgaccacgcgaatcgtcacttccgattcttcctgaaactgcgggatcaccgcattcagccatgtctgaaactggctctcttccggtaacccggaattatcttcacatgccagttgtaaatcgaggatcacctgactcatttttgttcctgttcttcgcgcttgcgttctgctgccagcgccgcttttcgtttttgttcggcttcttcccaggcttcataggcgttaacgatacgcgccaccacagggtgacgaaccacgtcttcgctgtggaagaagttaaagctgatctcttcgacatcggccagcacttcgatggcgtgacgtaagcctgatttagtattacgcggcaggtcgatctgtgtgacgtcgccggtgataaccgcttttgagttaaaaccgatacgggtcaggaacatcttcatctgttcgatggtggtgttctggctctcatcgagaatgataaacgcgtcgttcagcgtacgaccacgcatataggccagcggtgcgacttcaataacgttgcgctcaatcagtttctcgactttctcaaagcccagcatttcaaacagcgcgtcgtacagcgggcgcagatacgggtctactttctggcttaaatcgccaggcaggaagcccagtttctcaccggcttctactgccggacgagtcagcagaatacggcgaatttcctgacgctccagggcatcaactgccgcagccactgccaggtaggttttacccgtacccgccgggccaacgccgaaggtaatgtcatggtcgagaatattggcgatgtactgcgcttggtttggcgtgcgcggcttaattacgccgcgtttggttttgatattgaccgctttgccgtactccggcacgctctccgcgctttgctccagtacccgcgcttctttaatcgcaaggtggatctgttccggttcgatatcctgaatctgaccgcgcatcggggcagtatcgacatacaggctacgcagaatgtctgccgcagcggtgacgcaaatcggacggccggtcagtttaaagtggttatcgcggcgattgatctcgatgccgagacggcgttcgagctgcttgatgttgtcatcaaacgggccgcacaggctcaacagacgcgcattgtctgctggctccagggtgatttcgcgagtgtctatgttcaaaccgttcctcttatctgtatgccgccggaagctgaacattcaccggcctataaggaaattattcacgccacaggaaaaaggcgcaagcattgcaataaagatggggataaagagagaaaaaacaaggcccaccggaacggcaggcctgagaattacggctgataataacccacgccaaggtcgttttctttgcgggtacgggcaatcactgattccggtgtttctgccacgcgcagacccatttcatcttcagtacgcaccactttaccgcgcagagagttcgggtagacgtcggtaatttctacatcgacgaatttaccgatcatatccggcgtgccttcgaagttgaccacgcggttattttccgtacgcccggaaagctccatgatgctcttacgcgatgtaccttctaccagaatacgctgggtggtgccgagcatccggcggctccacgccatcgcttgctgattaatgcgctcttgcagaatatacagacgctgcttcttctcttcttccggaacatcatcaaccatatcggcggctggtgtacccggacgtgcagagaagataaagctgtagctcatgtcgaaattgacgtcggcaatcagcttcatcgttttctcgaagtcttcggtggtttcgccagggaagccaacgatgaaatcagaactgatctgaatatctggacgcgccgcacgcagtttacggatgatcgctttgtactccagcgccgtatgggtacggcccatcaggttcagaatgcgatcggaaccgctctgtaccggcagatgcaggaagctcaccagctccggcgtgtcgcgatacacttcgatgatatcgtcggtgaattcgatcggatggctggtggtaaagcgaagacgatcgatcccgtcgatcgcagcaaccagacgcagcagatcggcaaacgatccggtggtgccgtcgtagttttcaccacgccaggcgttcacgttctgaccgagcaggttgacttcacgcacgccctgagccgcaagctgggcaatctcaaacagaatatcgtcggacggacggcttacctcttcaccacgggtgtaaggcaccacgcagtaggtgcaatatttattgcagccttccatgatggagacaaacgcggtcggcccttcggcgcgcggttccggtagacggtcaaacttctcgatttccgggaagctgatatctacaaccgggctgcggtcgccacgcacggagttgatcatctccggcagacggtgcagcgtttgcggcccaaaaataatatcgacatagtgggcgcgctggcgaatgtgctcgccttcttgcgatgccacgcagccaccgacgccgataatcaggtctggattcttctcttttaacagtttccagcgacccaactgatggaagactttttcctgagccttctcgcggattgagcaggtgttcagcagcagcacatccgcttcttccgccacgtcggtcagttgatagccgtgggtggcatccagcagatcggccatcttcgatgaatcgtactcgttcatctgacagccccaggttttaatatggagttttttggtcatcgacttgctcttgcgaaatagtagccaggaatgcagggcgcatagtgtaatgctttgctgccgttgtgaccagtatgagcgttatcagcccttaggggtaaaaatcctgtaaacttaaagcatattgctaacaggatgattgaccatgacaaatcaaccaacggaaattgccattgtcggcggaggaatggtcggcggcgcactggcgctggggctggcacagcacggatttgcggtaacggtgatcgagcacgcagaaccagcgccgtttgtcgctgatagccaaccggacgtgcggatctcggcgatcagcgcggcttcggtatcattgcttaaagggttaggggtctgggatgcagtacaggctatgcgttgccatccttaccgcagactggaaacgtgggagtgggaaacggcgcatgtggtgtttgacgccgctgaacttaagctaccgctgcttggctatatggtggaaaacactgtcctgcaacaggcgttgtggcaggcgctggaagcgcatccgaaagtaacgttacgtgtgccaggctcgctgattgcgctgcatcgccatgatgatcttcaggagctggagctgaaaggcggtgaagtgattcgcgcgaagctggtgattggtgccgacggcgcaaattcgcaggtgcggcagatggcgggaattggcgttcatgcatggcagtatgcgcagtcgtgcatgttgattagcgtccagtgcgagaacgatcccggcgacagcacctggcagcaatttactccggacggaccgcgtgcgtttctgccgttgtttgataactgggcatcgctggtgtggtatgactctccggcgcgtattcgccagttgcagaatatgaatatggcacagctccaggcggaaatcgcgaagcatttcccgtcgcgtctgggttacgttacaccgcttgccgctggtgcgtttccgctgacgcgtcgccatgcgttgcagtacgtgcagccagggcttgcgctggtgggcgatgccgcgcataccatccatccgctggcggggcagggagtgaatcttggttatcgtgatgtcgatgccctgattgatgttctggtcaacgcccgcagctacggcgaagcgtgggccagttatcctgtcctcaagcgttaccagatgcggcgcatggcggataacttcattatgcaaagcggtatggatctgttttatgccggattcagcaataatctgccaccactgcgttttatgcgtaatctcgggttaatggcggcggagcgtgctggcgtgttgaaacgtcaggcgctgaaatatgcgttagggttgtagccttacaacattgccggatgcgtgccaaccgtaggtcggataagacgcggcagcgtcgcatccgacattgaaggataagacgtgtcaacatcgcattcgacattgaatgaacgcagaaaagcaaaaagctcgccgaagcgagcttttttaatgtggctggggtacgaggattcgaacctcggaatgccggaatcagaatccggtgccttaccgcttggcgataccccaactgggtgcacttacaaggtaagcgtcttgaataaattggctggggtacgaggattcgaacctcggaatgccggaatcagaatccggtgccttaccgcttggcgataccccaacaaattggttttgaatttgccgaacatattcgacacattcagaatttggtggctacgacgggattcgaacctgtgaccccatcattatgagtgatgtgctctaaccaactgagctacgtagccagattgtttcttcgatggctggggtacctggattcgaaccagggaatgccggtatcaaaaaccggtgccttaccgcttggcgataccccaataaccgggcggtgaaccgcttactcgaagaagatggctggggtacctggattcgaaccagggaatgccggtatcaaaaaccggtgccttaccgcttggcgataccccatccgtacaacgctttctggtgaatggtgcgggaggcgagacttgaactcgcacaccttgcggcgccagaacctaaatctggtgcgtctaccaatttcgccactcccgcaaaaaaagatggtggctacgacgggattcgaacctgtgaccccatcattatgagtgatgtgctctaaccaactgagctacgtagccatcttttttttcgcgataccttatcggcgttgcggggcgcattatgcgtatagagccttgcagcgtcaacctctttttcaaggaaaattgctcgaaagtgactgtttggttaggttgcgaacagcgtggcgctatattcgtcaattattgtttactttgtgttttttcccaccctacagccattcttttgtcatacaggatgaaattcggaatttaacaatagtggtgggaaattaatctatgaaatactggcctacagtgatgagttgtcaaacagtgatgtggcaaacccggaacatttccttactgcatatcagaatcaacaagcacctcaataactgaaacagccccggatttcaccggggctgtttcgcatttcttacttatacgccgactggtgaacaccaaccgcgcgaccagacggatcgtccattttcttgaacgcttcatcccattcgatcgctttagcggaagaacaagcgacggaaggaccgcccggcacgcactcagcggcgctcggaagcgggaatagttcttcaaagatctcccgatacaagtacgcttctttagaggttggcgtgttgtacgggaagcggaagcgggcagtttccagttgctgatcagaaacctgctgcgcagccacttctttcagggtgtcgatccaactgtaaccgacgccatcggagaactgctctttctgccgccaggccacgcttgcaggcagatacgcttcaaaacattcacgcaggatgtgtttttccattttgccgttaccgcacattttatcctgtgggttaatacgcatcgccacatcaaggagttttttgtcgaggaacggaacgcgtgcttccacgccccaggctgacatcgctttgttggcacgcgcgcagtcatacatatgcagggccagcagtttacgcaccgtctcttcatgcagttctttggcattcggtgctttgtggaagtaaagataaccgccgaacacttcatcagaaccttcaccggacagcaccattttaatgcccatcgccttgatcttacgcgacattaaatacatcggtgttgaagcgcgaatagtggtcacatcataagtttcgatgtggtaaatcacgtcgcggatggcatccagaccttcctgtacagtgaagtgaatttcgtgatgcaccgtgcccagatggtttgccacttcctgggctgctttcagatccggtgaacccggcagacctacagcaaaggagtgtaactgcggccaccaggcttcagagcgttcctgatcttccacgcgacgggctgcgtatttcttggtgatagcggaaataattgaggaatccagaccaccagaaagcagcacaccgtaaggcacatcagacatcagatggcttttaactgaatcttccagtgcctgacgcagctcgtttttgtcggtcacgttatctttcaccgcatcgtagtcgaaccagtcgcgatgatagtaagaacggatttcgccgtcctggctccacaaatagctccccgccgggaactctttaatcgtgcggcaaactggcaccagcgctttcatttctgaggccacatacagctgaccgtgttcgtcataccccatatacagtgggatgatccccagatggtcgcgaccaatcaggtaggcatctttttcgctgtcgtacagtgcaaaggcaaacatgccctgcaagtcgtcgagaaattccggccctttttcctgatacagcgcgaggatcacttcacagtcagacccggtctggaactggtaacgatcgccatattcggcgcgcaatgcctggtggttgtagatttcaccgtttaccgccagtacgtgggttttttgttggttgtagagaggttgcgcccccgcgttaacgtcaacaattgacagacgttcgtgggcgagaatggcgttatcgctggcataaataccggaccagtccgggccacgatgacgcatcaggcgtgacagctcgagggctttcttacgcagctcaactgcgtctgttttgatatcgaatacgccaaaaattgaacacataaccttctccgttaacctggtatttgttgcttgttgtgtttgcttgtttaaaaaaatgccgcaaagcagcactgtgcgcaagcgatttggcggtgaaaaaataaaaaacgtaatggtgattgtcgattggtgaaaaaaggtctggtgtgaggatatatttattgatgaatcgataatttttagcgggttttattgaatgtttatattttacgggggccaaattgctgacaaagtgcgatttgttcatgccggatgcggcgtgaacgccttatccggcctacaaaagcatgaaaattcaatatattgcaggagctgcgtaggcctgataagcgtagcgcatcaggcagtttggcgtttgtcatcagagccaaccacgtccgcagacgtggttgctattcagataacgtcgatttcagcgactgacgggtaaatccagctggggcggaaaggcatactgtcgatatcgtcgagcgacgaaacaccagaaagcaccagaatcgtctccagacctgcctggaagccggccagaatatcggtacgcaggttatcgccgacaatcaccgtttcttccgaatgcgcctgcattttgtttaatgctgcgcggatgatccacgggctgggcttaccaacatagaacggtttgcgcccggagattttctcaatccctgcacacaacgcgccacaagcgggataaaaaccgcgcccgtgggtgtccggattggtggcgataaaacgtgcaccgttagcgacgaaataggctgctttatgcatcatgtcccagttgtaggaacgcgtttcgccaacaatcacgaaatcagggttcacatcggtaatagtgaaaccggctttgtacagttcatgaatcagtgcgccttcgcccaccacatacgctttcttgccttcctggcgacgcaggaaatcggcagtcgccatcgcagaggtataaaacacgctgtcaggtacatcgacacctgcggtggcaaagcggttcgccagatcttgcccagtctgcgaaggatagttggtcagcaacaccagcggcaggcctttatccataatcccgtgcaaaaattccgctgcacccggtacggcgacgttatcgtgcatcagcacgccgtcgatatcgcaaattacatttttaatggtcatggactacccagaatattgacaacaataagcgccactataaaagcacattaattttccagcaaatgctggagcaaaataccgttgagcatggcgcgttttaccagcgcaaaagcgccgattgccgagcggtgatccagctcagaacgtaccaccggcagattagtgcgaaacgccttcagcgcctgggtattaatgcagctttcaatagcagggagcagcactttatcggcttcggtgatttcaccggcaataacaattttttgcggattaaataagttgatagcaatggcgatggttttacccagatgacgaccgacatactcaattacttccgacgccagactatcgcctttgttcgcggctttgcagatagttttgatggtgcagtcgtccagcggcacgcggctctggtagccctgctttaacagattcaacacccgttgttcaatggcagcgttggcagcgatagtttccaggcagccaaagttgccgcagtggcagcgttcacccagcggttcgacctgaatatggccaatttcaccgacgttgccgttgcggccaataaaaatgcgcccgttagagataatcccggccccggttccgcgatggacacgcaccagaatggagtcttcgcaatcctgacttgcaccgaagtagtgctccgccagcgccagactacggatatcgtgaccaacgaaacaggtcactttaaaacgttcttccagagcttctaccagcccccagttttctacctgaatatgcggcatgtaatgaattttgccgctgtccgggtcaacaagccctggcaggatcaccgaaatcgcgatcagctcgcgcagtttgcgctggtagctatcaataaactgagcaatggcattcaacagggcatgttccagcgtttgctgggtacgttccggcagcgggtaatgttcttctgccagcactttgctgctgagatcaaacagagtgatggtggcgtcatgacgaccaagccgtacgccgattgcgtggaaattgcgggtttcggtgacgatggagatagcgcggcggcccccggtggaggcctgctgatcaacttctttgatcagcccgcgttcgataagctgacgcgtaattttggttacgctggcgggggcaagctggctttgctcggcaatctgaatccgcgagattggcccgtactggtcaatcaggcgataaaccgccgcgctgttaagctgttttacgagatcaacattacctatctgagcttgtccgcctggtgtcatactttctcttattgagttacgacctcgttaccgttaacgatggtcttggtgattttaaaatcaggtgtgaatgcagtcaggttggctactttacctgcggcgagtgtgccgagacgtttctcaacgccaatcgcacgcgccggatagagcgtcgccatacgtagcacttcatccagtgcgataccgcaatgttcgaccagattacgcacgccttcaatcatggttaaggatgaaccgcttaacgtaccgttctcatccacacaaagtccgttacggtagtatattgttttacccgcaaaaatgaactgttcaatgttggcacctgctggcgcggtggcgtcagtaaccagacacagtttgtcgcctttcagacgtttagcgttgcgaatgttggcgtaatcaacatgcaggccatcagcaataataccgcaataaatgtcagcttcgtcgaggatcgcgcccgccaggccaggttcacgaccggtaatatacggcatcgcgttgtacagatgggtggcaaaggtaatccccgcgcggaaaccggcttttgcttctttcaacgtcgcgttggagtgaccggcagaaaccacaatcccggcatttgccagtttgctgatgacttccgcaggaaccatttccggtgccagggtcactttggtaatgacgtcggcgttttcacacaggaaatcgaccagcgcggcatcaggcttacgcacaaaattcggattatgggtgcctttttttaccagattcagccacggaccttccagatgcagacctaacgcctgattcggatgttttgccaggtactcgcgcataacgcgcacgccctgtttcatcagctcatcgctggtggtgataagcgtcggcagatagttagtacagcctgatttctcattggctttctgcatgatttccagcgtttccacgctgaccgcttcagcggtgtcgttaaactgtacgccgccgcagccgtttaactgcacatcgataaaaccgggggagagaatggccccgttcagtgaacgttgttcgatctctggcggcagttccgctaccggacagacgcttttaatcaggccatcagcgataacaaccgcgtggtcatcaagaaattcgtggccggtaaagatccggccctgggttaatgcatacattctgacccccgattttaaaaaatattgccctgagcaaggagccagggcagggataacaattacagacctttgatattttctgcttctaattcattgaaatatcttaaagtcttaactttcagctccatggtggaaggttcatcgcacaccatgatcgctttcggatgcagttgcagacagctgatggtccacatatggttcacgcaaccttcaacggcggcctgcagcgccagtgctttctggctacccagcaccagaatcatcacttcttcggcatccagcagtgtaccaacaccgacagtcagggcatattttggcacctgattaacatcgttatcaaagaaacgagagtttgcgacgcgagtgtcatgagtcagggttttgatacgagtacgagaagccagagaagacgccggttcgttaaatgcaatatgaccgtcgttacctacaccgcccataaacagatgaatttttccgtaagaacggattttttcttcatactggcggcactcggcgtcgatatccggggcgttgccgttgagaaggttgatgttttctgctggaatatcaacgtgatcgaagaaattacggtgcataaagctgtagtagctttccggatgctctttcggcagaccgacatattcgtccatgttgaaggtgacaacgtgcttaaagctgacctggcctgctttatgcatttcgactaacgctttataggtggtcatcggcgtgccgccagtcggcaggcccagtacaaacggacgatcggcagtcggtttgaacgcattgatacgattgacgatatggcgagcagcccatttgccgacctgttcagcggtagtcagggggatcagtctcattattcacctcaataagtaaaatgtaagccgttggcggattaggcatctttaagcgtaacctggatttgcgcagacaggcgtcaatccgacctgattttttgaatgataaaataagttttctggtttagccagtaaaagggagtgatgataacgatatttggtgacaaaactcacaaaagacacgcgtttaatttgcgatacgaattaaattttcacacactctgtagcagatgatctaacaatctgattacagaacatcggcagtacaatttgcagcaaaataaaaatacggcttgaaacgagccaaatagggttctcgtagggggaataagatgaatattttaggttttttccagcgactcggtagggcgttacagctccctatcgcggtgctgccggtggcggcactgttgctgcgattcggtcagccagatttacttaacgttgcgtttattgcccaggcgggcggtgcgatttttgataacctcgcattaatcttcgccatcggtgtggcatccagctggtcgaaagacagcgctggtgcggcggcgctggcgggtgcggtaggttactttgtgttaaccaaagcgatggtgaccatcaacccagaaattaacatgggtgtactggcgggtatcattaccggtctggttggtggcgcagcctataaccgttggtccgatattaaactgccggacttcctgagcttcttcggcggcaaacgctttgtgccgattgccaccggattcttctgcctggtgctggcggccatttttggttacgtctggccgccggtacagcacgctatccatgcaggcggcgagtggatcgtttctgcgggcgcgctgggttccggtatctttggtttcatcaaccgtctgctgatcccaaccggtctgcatcaggtactgaacaccatcgcctggttccagattggtgaattcaccaacgcggcgggtacggttttccacggtgacattaaccgcttctatgccggtgacggcaccgcggggatgttcatgtccggcttcttcccgatcatgatgttcggtctgccgggtgcggcgctggcgatgtacttcgcagcaccgaaagagcgtcgtccgatggttggcggtatgctgctttctgttgctgttactgcgttcctgaccggtgtgactgagccgctggaattcctgttcatgttccttgctccgctgctgtacctcctgcacgcactgctgaccggtatcagcctgtttgtggcaacgctgctgggtatccacgcgggcttctctttctctgcgggggctatcgactacgcgttgatgtataacctgccggccgccagccagaacgtctggatgctgctggtgatgggcgttatcttcttcgctatctacttcgtggtgttcagtttggttatccgcatgttcaacctgaaaacgccgggtcgtgaagataaagaagacgagatcgttactgaagaagccaacagcaacactgaagaaggtctgactcaactggcaaccaactatattgctgcggttggcggcactgacaacctgaaagcgattgacgcctgtatcacccgtctgcgccttacagtggctgactctgcccgcgttaacgatacgatgtgtaaacgtctgggtgcttctggggtagtgaaactgaacaaacagactattcaggtgattgttggcgcgaaagcagaatccatcggcgatgcgatgaagaaagtcgttgcccgtggtccggtagccgctgcgtcagctgaagcaactccggcaactgccgcgcctgtagcaaaaccgcaggctgtaccaaacgcggtatctatcgcggagctggtatcgccgattaccggtgatgtcgtggcactggatcaggttcctgacgaagcattcgccagcaaagcggtgggtgacggtgtggcggtgaaaccgacagataaaatcgtcgtatcaccagccgcagggacaatcgtgaaaatcttcaacaccaaccacgcgttctgcctggaaaccgaaaaaggcgcggagatcgtcgtccatatgggtatcgacaccgtagcgctggaaggtaaaggctttaaacgtctggtggaagagggtgcgcaggtaagcgcagggcaaccgattctggaaatggatctggattacctgaacgctaacgcccgctcgatgattagcccggtggtttgcagcaatatcgacgatttcagtggcttgatcattaaagctcagggccatgttgtggcgggtcaaacaccgctgtatgaaatcaaaaagtaatctgctttatgcctgatgcgacgcttgagcgtcgcatccaacaatgacaagcggtggagatcttctctgccgctttttttttcatcaatcatccccataatccttgttagattatcaattttaaaaaactaacagttgtcagcctgtcccgcttataagatcatacgccgttatacgttgtttacgctttgaggaatccacgatgagtgaggcagaagcccgcccgactaactttatccgtcagatcatcgatgaagatctggccagtggtaagcacaccacagtacacacccgtttcccgccggagccgaatggctatctgcatattggccatgcgaaatctatctgcctgaacttcgggatcgcccaggactataaaggccagtgcaacctgcgtttcgacgacactaacccggtaaaagaagatatcgagtatgttgagtcgatcaaaaacgacgtagagtggttaggttttcactggtctggtaacgtccgttactcctccgattattttgatcagctccacgcctatgcgatcgaactgatcaataaaggcctggcgtacgttgatgaactgacgccggaacagatccgcgaataccgcggcaccctgacgcaaccgggtaaaaacagcccgtaccgcgaccgcagcgttgaagagaacctggcgctgttcgaaaaaatgcgtgccggtggttttgaagaaggtaaagcctgcctgcgtgcgaaaatcgacatggcttcaccgtttatcgtgatgcgcgatccggtgctgtaccgtattaaatttgctgaacaccaccagactggcaacaagtggtgcatctacccgatgtacgacttcacccactgcatcagcgatgccctggaaggtattacgcactctctgtgtacgcttgagttccaggacaaccgtcgtctgtacgactgggtactggacaacatcacgattcctgttcacccgcgccagtatgagttctcgcgcctgaatctggaatacaccgtgatgtccaagcgtaagttgaacctgctggtgaccgacaagcacgttgaaggctgggatgacccgcgtatgccgaccatttccggtctgcgtcgtcgtggttacactgcggcttctattcgtgagttctgcaaacgcatcggcgtgaccaagcaggacaacaccattgagatggcgtcgctggaatcctgcatccgtgaagatctcaacgaaaatgcgccgcgcgcaatggcggttatcgatccggtgaaactggttatcgaaaactatcagggcgaaggcgaaatggttaccatgccgaaccatccgaacaaaccggaaatgggcagccgtcaggtgccgtttagcggtgagatttggattgatcgcgccgatttccgcgaagaagctaacaagcagtacaaacgtctggtgctgggtaaagaagtgcgtctgcgtaatgcttatgtgattaaggcagaacgcgtcgagaaagatgccgaaggtaatatcaccaccatcttctgtacttatgacgccgataccttaagcaaagatccggcagatggtcgtaaagtcaaaggtgttattcactgggtgagcgcggcacatgcgctgccggttgaaatccgtttgtatgaccgtctgttcagcgtgcctaacccaggtgctgcggatgatttcctgtcggtgattaacccggaatcgctggtgatcaaacagggctttgctgaaccgtcgctgaaagatgcggttgcgggtaaagcattccagtttgagcgtgaaggttacttctgcctcgatagccgccattctacggcggaaaaaccggtatttaaccgcaccgttgggctgcgtgatacctgggcgaaagtaggcgagtaattttaagtttcgctatgccggatggggcgtttacgtcgcatccggcaaggaacagacaaacagtttcaaacgctaaattgcctgatgcgctacgcttatcaggcctacatgatctctgcaatatattgagtttgcgtgcttttgtaggccggataaggcgttcacgccgcatccggcaagaaacagcaaacaatccaaaacgccgcgttcagcggcgttttttctgcttttcttcgcgaattaattccgcttcgcaatttatccataaaataaatttaaaataacaaaacataattaaataaaatgtaaccgctttcatcttgctggaatttcacgcttttattcttctgcaagcctttcaaccgcaaacttaagccttgtaacaaaaatcatcaaaatatgtgcggttgctcatgttcttacattctggttacagaaagagattgataattcgcgtcgcgaaaaatagtctgttcctgtagtcagcgagacttttctcaacgctacttttttaatttttattttttcgctgttcacctttggtgcagcaatttatacgtcaaagaggattaacccatgcgtacgtttagtggcaaacgtagtacgctggcgctggctatcgccggtgttacagcaatgtcgggctttatggcaatgccggaggctcgcgccgaaggattcatcgacgattcaaccttaaccggcggtatctattactggcagcgtgaacgcgaccgtaaagatgttaccgacggcgacaaatacaaaaccaacctttctcactccacctggaatgccaacctcgattttcagtccggttatgctgctgatatgttcggccttgatattgctgcgtttacggcgattgaaatggcggaaaacggcgacagctcccacccgaacgaaatcgcgttttcaaaaagtaataaagcctatgacgaagactggtccggcgacaaaagcggtataagcctgtataaagctgcggccaaatttaaatacggtccggtttgggcgagggcaggttacattcagccaactggtcaaacgctgttagcgccgcactggagctttatgccaggtacttatcagggggcggaagccggggcgaattttgattacggcgatgctggtgcgttgagtttctcctacatgtggaccaacgaatacaaagcgccgtggcatctggaaatggatgagttttatcagaacgataaaaccaccaaagttgattatctgcactcctttggggcgaaatacgacttcaaaaataacttcgtactggaagcggcatttggtcaggcggaagggtatatcgatcaatattttgccaaagccagctacaaatttgatatcgccggtagcccgttaaccaccagctaccagttctacggtacccgagataaagttgacgatcgcagcgtcaacgacctttatgacggcaccgcctggctgcaagcgttgacctttggttaccgggcggctgacgtagtggatttgcgcctcgaaggcacctgggttaaggctgacggtcagcagggatacttcctgcaacgtatgactccaacctacgcttcctcaaacggtcgcctggatatctggtgggataaccgttctgacttcaacgccaacggcgaaaaagcggtcttcttcggtgcgatgtatgacctgaaaaactggaatcttccaggcttcgccatcggcgcttcctacgtttacgcatgggatgctaaacctgcgacctggcagagcaatccggatgcgtactacgacaaaaaccggactattgaagagtctgcctacagcctggatgcggtctataccattcaggacggtcgcgccaaaggcacgatgttcaaactgcatttcaccgaatacgacaaccactccgacatcccaagctggggcggtggttacggcaacatcttccaggatgagcgtgacgtgaaatttatggtaatcgcaccattcaccatcttctgatgcccgacgcggcaggttttgtgcctgccgcacgtttgaggaatttgctatgaaaaaactgattctcatcgccataatggcatcggggctggtagcttgtgcgcaatcaaccgcgccacaggaagacagtcgtctgaaagaggcatacagcgcctgtatcaacaccgcacaaggttcgccagaaaaaattgaagcctgccagagcgtgttaaacgtgctgaagaaagagaaacaacatcagcagtttgccgaccaggaaagtgtacgcgtactggattatcagcagtgtctgcgtgcaacgcaaaccggaaatgatcaggcggtgaaagccgattgtgataaagtctggcaggaaatacgcagtaataacaaataagtgagagctgtaactctcgcttttcttatttcccttgcataaaaaagccaacccgcaggttggcttttctcgttcaggctggcttatttgccttcgtgcgcatgttcatcttcgcggcaatcgccttcggcacagtgaccgtaaagatagagactgtggttagtcaggcgaatgccatgttttgcggcaatttcacgctgacgcgcttcgatggaatcatcactaaattcgataaccttgccgcagtcgaggcagatcaggtgatcgtggtgatgttgctgtgtcagttcaaatacggatttaccgccttcaaaattgtggcgggtgacgataccagcgtcgtcaaactggttcagtacgcgatataccgtagccagaccaatttcttcacccatatcgatcagacgtttgtataaatcttccgcactgacgtgatggttgtccggctcctgaagaacttccaggatttttaaacgaggaagcgttactttcaggccagctttctttagggcggtattgttatcagtcatgcggaatctgtcctgttactaagcggttcacttcattagaagaagtgacagaatttgctcttgagataatgcgtatcattatagaattgccacgcctaaatgaaaaccacaagtccctggcaaatattgttaataaaaacgtggcacagcttacatttacaacggcaaggccacttgaacaccgggacattgtacaggtacaacagcaaaagttacaaatttgtagcaattattttgattggcattatctattaatacggcgtagacatgagtctacgccgcatcacatcaggcattgagaatttcgtcgagatgcaactcttcagaaatctgtttaacccatttttctacacgttcagcggtcagttccggctgacggtcttcgtcgatagccagaccgacaaagtggtcgtcatctgccagaccttttgatgcttcgaaatgatagcccgcagttggccagtgaccaacgatggttgcaccgcgcggttcaatgatgtcgcggatggtgcccaatgcgtcgcagaaatattcggcgtaatcttcctggtcaccacaaccaaacagcgcaaccagtttgccgttgaaatcaatctcttcgagagtcgggaagaagtcatcccagtcacactgcgcttcgccgtaataccaggttgggatgcccagcagcagaatgtcataagcttccagatcttctttgctgctttttgcaatgtcatggacatcggcaacgtctttaccaagctgtttttgaatcatttttgcgatattttcggtattaccggtgtcgctgccgaaaaagatgccagtgatagccatgagtgaaataacctcttgaaacttattgaaatgggggtggaaaattgcccacggataaaggcaatcatagcagaacaggcagtcttgcggaatcagcaaacgagcaggactgcacactgtgctacatgaaagtggaaatttaaacgatgccctgactacgcagcgccgccagttgctgcattaacatctcttcgatcagttcgctacggctcatattgcgcgactccgccagctcgttcagcgcctcgacagcttccgcgttcagcttcagttcgacacgcttaaggccacgtactttgtcgcgttttagctggttgcgtttattaatacgcagctgttcatcgcgcgaaagcggattagttttcggtcgtcccggtcgacgctcgtgcgcgaacagatctaatgtcgtacggtccgtttgttctttggccatgatcttggtgacttcgggggaaacaatcagccaggcctctgcccggatggatagcgcgccataatacatcagcgcgatgagtcacgccaacgcccacgcgcggaaagcgacgcggacgctgggtttttaatcagttgcgttaatcattgagatagcgacggatagcgcgtaataccgcatccggtttttcagcatggacccagtgacccgcgcctgcaatcacatgcgcccgtgcctgtggaaattgagccagtaaatcatcacggtactgctcgctaacatacggagaattgccgccagggataaacagggcagggtgatcccatgccgggattttctcccaacctacaatatgcggatactgatcccacaataccggcacgttaaagcgccactccccgtcaacaaaagatttcagcagaaactgaatcaccccttcttcattaagatgctggcgcattattgctgctgcttgctggcgagtttgtgcgtccgattcactgaccgcgttgatagccgcaaaaatctcatcatgacggcgtacgtgatagtcgaccggcgcgatatcgatcgccaccagtttatcgatgcgatcggaggctagtgcagtaagtgccattaccgctttaccgcccatggagtgaccgataaatgttgctttgtcgatctgctgtgcatccagagtatcaacaagatcctgcgccatcgccgggtaattcattaccggatctctcggtgaaagaccgtggttacgcatatcaacctggatgatattgtgatcgtttaccagatcgcgagccagtacgccaaggttgtcgaggctgccaaacagaccgtggacaagaacgatgggagaattattgtgctggttttgtgcagtttgcgcgcggatattcaatttcatggcaaagttctttttttcgcgttgtcgggttagggtattatgttgaccattgtgccacagggctgcaacaaataaggtttattccgagtttttctgcaagccaggcttgacgctatccgctgccgggatttattcatatactcctggcgacttgtattcagctaagacactgcactggattaagatgaaaacgattgaagttgatgatgaactctacagctatattgccagccacactaagcatatcggcgagagcgcatccgacattttacggcgtatgttgaaattttccgccgcatcacagcctgctgctccggtgacgaaagaggttcgcgttgcgtcacctgctatcgtcgaagcgaagccggtcaaaacgattaaagacaaggttcgcgcaatgcgtgaacttctgctttcggatgaatacgcagagcaaaagcgagcggtcaatcgctttatgctgctgttgtctacactatattctcttgacgcccaggcgtttgccgaagcaacggaatcgttgcacggtcgtacacgcgtttactttgcggcagatgaacaaacgctgctgaaaaatggtaatcagaccaagccgaaacatgtgccaggcacgccgtattgggtgatcaccaacaccaacaccggccgtaaatgcagcatgatcgaacacatcatgcagtcgatgcaattcccggcggaattgattgagaaggtttgcggaactatctaaaacgttgcagacaaaggacaaagcaatggcaatccacaatcgtgcaggccaacctgcacaacagagtgatttgattaacgtcgcccaactgacggcgcaatattatgtactgaaaccagaagcagggaatgcggagcacgcggtgaaattcggtacttccggtcaccgtggcagtgcagcgcgccacagctttaacgagccgcacattctggcgatcgctcaggcaattgctgaagaacgtgcgaaaaacggcatcactggcccttgctatgtgggtaaagatactcacgccctgtccgaacctgcattcatttccgttctggaagtgctggcagcgaacggcgttgatgtcattgtgcaggaaaacaatggcttcaccccgacgcctgccgtttccaatgccatcctggttcacaataaaaaaggtggcccgctggcagacggtatcgtgattacaccgtcccataacccgccggaagatggtggaatcaaatacaatccgccaaatggtggcccggctgataccaacgtcactaaagtggtggaagacagggccaacgcactgctggccgatggcctgaaaggcgtgaagcgtatctccctcgacgaagcgatggcatccggtcatgtgaaagagcaggatctggtgcagccgttcgtggaaggtctggccgatatcgttgatatggccgcgattcagaaagcgggcctgacgctgggcgttgatccgctgggcggttccggtatcgaatactggaagcgtattggcgagtattacaacctcaacctgactatcgttaacgatcaggtcgatcaaaccttccgctttatgcaccttgataaagacggcgcgatccgtatggactgctcctccgagtgtgcgatggcgggcctgctggcactgcgtgataagttcgatctggcgtttgctaacgacccggattatgaccgtcacggtatcgtcactccggcaggtttgatgaatccgaaccactacctggcggtggcaatcaattacctgttccagcatcgtccgcagtggggcaaagatgttgccgtcggtaaaacgctggtttcatctgcgatgatcgaccgtgtggtcaacgacttgggccgtaaactggtagaagtcccggtaggtttcaaatggtttgtcgatggtctgttcgacggcagcttcggctttggcggcgaagagagtgcaggggcttccttcctgcgtttcgacggcacgccgtggtccaccgacaaagacggcatcatcatgtgtctgctggcggcggaaatcaccgctgtcaccggtaagaacccgcaggaacactacaacgaactggcaaaacgctttggtgcgccgagctacaaccgtttgcaggcagctgcgacttccgcacaaaaagcggcgctgtctaagctgtctccggaaatggtgagcgccagcaccctggcaggtgacccgatcaccgcgcgcctgactgctgctccgggcaacggtgcttctattggcggtctgaaagtgatgactgacaacggctggttcgccgcgcgtccgtcaggcacggaagacgcatataagatctactgcgaaagcttcctcggtgaagaacatcgcaagcagattgagaaagaagcggttgagattgttagcgaagttctgaaaaacgcgtaaacacatttaataaaaaaagggcggtcgcaagatcgcccttttttacgtatgacaaacacagaattgcctgatgcgctacgcttatcaggcctacgaggatggtgcaatatattgaatttaagcgattttgtaggccggataaggcgttcacgccgcatccggcaaaaacaacgaacactttgtcaacaaactgagtagctcaaggaaatcccaatgaagaccaacaggagtctggtcgtcatagtgtcactaattaccgccacattactgctgactgcatgcgcccaacctgaacaatcatcattagctggcgactggttactgacccctaaagataaaaccagaggattaacgggtagcattgcggtaaatattgcacctttccggtgtaagacaaattgccgtggtgataacttacctgataatacccgccgctggcagttgtcaggcgggaacgaaaaagaacttacttatcttcataatatgtcagcacaagaaaaggtcggtttaaatcccggttggcaatgctacacctcattttttatgcgggtttgccagggcaagcccggcactcgaccgatagtcaatgaggattatgtcagcgaaagcggattttttggctcgatgatgcatgtcgggattattgagttacgacgctgccagtcagaaaattgccagcaagaattgaaagcgataaatacacattaaaatagtgagtccgggaatgaaacccggacctgaacatgtcttattgcgtgaatgtttctttcatttgatactgcatttcccagagttcagtaagcgaaataacttttcttgttcttgcttcttcactttgtacccataagaaagggtagaacgtgaaggcttccgttgccgataattttattacgtcttctcgccattgctgccatcgtacattttcatagaaggtatctaaatcaccggataatgcccactgaagaaactcagaatatccaacttccagactttcccaattcagcgtatctggcgcaaaataataaacgcagccagtatcttccccaagatcgccaccattaagagcaaaaattccccctgcgacatcgtcagcgatgggtaaagcccgcacgcctgcgaattcagggcgttgtgtccaacttactggatctcgtggcaaccgggggtgaccagatcctgctatgcgtaaccaaccattatcaatcagcagacctccggagccatagacaagcgcacccatcggtgattttgttgtcacctgtaattgataaagtgcggtttcggctaaatctttattaaccggtaagagttcggtatggtttgtggtgtcttttaaccagttctggattattggccaggctgaatcttcagtatttactaactgattcatttcacgcatcgctacttgctccttgtgtgctacggtgtcatttatgatgaggaattgtatggaacattttttaaatattaagttccttatatttgaataaaaaatgactttatccatacattgccacttttttcaaagcataaaccgatacccaataccggtttcagtaataaaatggcgaggccgggccggatcctgttccagtttttgtcgcagatgccccatataattacgcaaatagttgctgtgttcgatcgcgtttagaccctacatctgccggatgcggcataaataacgaactatttgccaacaaacagaaagggcgatcattcaatcgcccttttttactttgttttattaaccgtgtttatttttcagttcaaagcgtggtgataccagaccatacagtgtccaaccaaggaaggtcacgatggaaccgtacagcatggcttcttccccggatgagtacagcgcataaaagctatacatcgcgccaacaaaagcaacaaagtttgcaactttcgcttttgaggggggcacattagcgaccttctgaataatgactaatgccgccattgacagaatatacggaatgatattggtcaccacggccaggttaaccagcacgttgaactgactgtttagcgacgggctaatggtcatcagtgccaatccactctgaataatcacaatggtcaacattccctgcaccggtgcatccactttggttacacgggagaaaattttagggaagtagccttcatcagatgaagatttaaacacctgggcaatggtgaactgccagccaagtagcgaaccgcagcaggacatcaccatcagcgccataatgactttacccacttccggcgtgaacatctgcgcgaaggccagaccaaatggtgccgttgaatttgccagctccatatttggcacaatcccggcaatcacgttggtggagacgatataaatcaccgccgcacctaacgtaccgccgagtaccgcgattggcacattacgttccgggttttccactacatcagtattcgcacacgcagactccagaccaagaaaagcccacagcgtcatagcgatggaagaacctaccgcactgaagaacggtgcatgatgcggattccaggaatcaacgtacagcgtcgggctaaaccagaaccagccaataatgcacagaccgacgaccggaataatgaccccccacacggtaatgctactgatttgcccggtaatgcgcgcaccaccaaagttagccacggtacaaatccacagcaccccgatggtcgcaagaccaatctgcactggcgacaaactcgcgccgagcagttcggtgccgtaaccaaccgccgaaatagcaatcgcgacgttagcaatcagcagtgagacgccgtaggtatagttcgccataaagttaccggatttaccgaaagcatactcggcataaccgcccataccgcctgatttacggctgaacataccgcattttgcgaatgcccatgccagtgccattgagcctacggctgtcaccagccaggagataattgagattgtcccgacttcggcaagctttgtcggcagcatgatgataccggagcccatcatgttgaccatcgtcagtatggttaactgaacgacgcccattttgttcgatttagcctgactcataatttttcccctttcaacagggtgctttgcgcatcacgaggcttgatgacatagcaccaaacttgcttacgaccatcatgttcttcgatatagacaccctgcagctccggtgcaaaacctggcagcaggttgatcccttcttccagagcgctgaagtaacgcagaacagcaccaccccagatttcacccggaacaacacacagcacacccggaggataaggaagcgcaccttcggcagcgatacggccttctgcatccggcagacgaaccagttccacttcaccgcgtaaataggcgtagttggcttcttgcggattcatgctgacgcgtgggaagtgctccttacggaacatctctttttgcagttgtttcacgttgtggcgggcatacaaatcatgcatttcctgacacaactgacgcagggtataaccggcgtagcgctcttcatgctgtttgtagatggaaggtagcacttctgctaatggcgcgtcggactcaagcagtttttcgaagcgtaccagcagggcaacaagttgctgaagtttggccatatcttctgccggagtcagcaggaagaggatggagttaagatcgcatttttccggcactacgccattttcgcgcaggaagttagcaagaatcgtcgcgggtacaccgaacgcttcatattcgccgttacgtgcatcaatacctggggttgtcagcaacagtttgcatggatcgacaaagtattgattctctgcatagccttcaaaagaatgccagtgttcccctggtacaaactggaagaagcgcagatcaaccgcaatttgcgctgtttcatacgactgccagggtttaccatccaccagttcaggtacgaacggacgaatatgctgacagttatcgaggatcagtttgcgggcattaatgccatttaccacacaatccatccacatattacgaccgctgacaccttcatgcattttggcgttgatatccagtgcggcaaacagcggatagaacgggctggtggaggcgtgcatcataaaggcgttgttcatgcgtttgtgcggtacataacgctgttgccctttgatgtggctgtcttttttatgaatttgtgaagtctgagaaaaaccagcctgttgtttatgcacagattgcgtaaccagaatacccggatcgttctcattaagatccagcaacagcggcgaacagtccgtcatcatcggaataaactgttcatagccgacccatgctgagtcaaacaggatgtagtcacacagatgaccaattttatccaccacttggcgggcgttataaatcgtaccgtcgtaggtgcctaactgaatcacagcgaggcggaaaggacgagcctcttttgcccgctgcggtgcgacttccgcgatcagctcacgcaggtaactttcttcaaaacagtgcgcatcaatgccaccgataaagccatacgggttacgtgccgtttccagataaaccggtgttgcaccagcctgtagcaacgctccgtggtggttagatttgtggttattgcgatcaaacagcaccagatcacccggtgttagcagggcgtttaaaaccactttgttagaagatgaagtgccatttaaaacgaagtaggttttatcggcattaaacacttttgccgcatgttgctgtgcaatgcatggcgcgccttcgtgaatcagcagatcgcccatcgctacgtcggcgttgcacaagtcggcacggaacagcgcctcaccaaagtattccacaaactgattccccgccggatggcgacggaaaaattcgccgccctgatgaccagggcaatcaaacgcgctgttaccttgattgacataatcgaccagtgcgcggaagaaaggtgggcgcagttgagtttcataatggctggcagcggtttctaactggcgaccataaaattctcgtcgcgattcgcaattctcaaagacacccgaaatacggggcaaatactctgcgggtacacgttcttgattttcagtagcaataaataccgggatgccataacccgtggcatcgatttcatcgagttttccgcatgtaacatcgttgagcgataaaactattgccgccacatcgatattacgactttcattaatgtagatacattctcgctgcgtggtaaaacagtccgggcaagaatcactaaccgcaatttttaattttgacatttttcatctctttattttaggtaatagcaggtcctcaatttctcgaatgagaaatcgatcgtgccggaaaaaagcaaagttaccccgctgataaataaatcaggtagattgcttttttcagaatgcagaaacccttaccagtcaggtggctgataatacaagggttaacagagaatgagcactgcggaatacaggcatatgcctgtaatacagagagtcaggaagacctgtacgctgaagtgcccttagtcggtagactaacgggcattgaagaagtgaaagtcgaagctattgcgatgagcaaacttcataatatgagttgtccgccttatatggggcatagtgcggctgttattttccatttaatttacctttcctgatgtgaatgaaggtgaagatattctatccaggaaatacggttgaactgtgaaggtgatcaataaaaaatgatcaatcttaatttatttaatgatgagctttttactcagtaatataaaatattgaattgttatttttgtgtgttgtttaagataaaaagccgtatttattattacggctttaattaataaaaggcaggctgtattaaaattaatattcaaagcataaaccgatagccaataccggtttcagtaatgaaatggcgtgggcgggcgggatcctgttccagtttttgtcgcagatgtcccatataaatacgcaaatagtgactgtgttcgaccgcgtttggcccccacacctggttaaggagctggcgctgggtgagtacttttccggcattgttgagcagcaccgccagcaggcggaactcaattggtgtgagatgcacctcttcctcaccccggtgaatcacgcgggcggctaaatcgacggtaacatcggaaaattttaccagcggatcgggcgcggtggtggcagagtggcggcgtaatgcgacgcgcagacgggcctgcaattcgccaatgccaaacggcttactcagataatcatccgctccggcatccagcgcggcgattttgtcgctctcttcgctgcgtgcggaaagcacaatcaccggcaccgcgctccactggcgcaggtcgcggataaactcaatcccatcaccatcgggcaggccgagatcgagaataatcaaatctggcttacgggttgccgcttccagcaagccgcgttgcagcgtttcggcctcaaagacgcgcatcccgtcgccctccagcgccgtgcgcagaaagcgacgaatagcctgttcatcttcaacaatcagaacgtttgtcacatatcctcatgaaattcttcaagttcaggggcagtttgctggggaagtgtaacacgaaaacaggcaccaccttccggtcggttgaacgcggtaatagtgcccccgtgtacatccactatcgcccgacaaattgccagtccaagccctacccccggtactgccgactctttattcccgcgagcaaacttatcaaatatcgtctgctcctggcctggcggaagaccggggccgttatcccagacatccagttgtagattttcgccctcaacgtgggcatcgataccaatttcggcctgcgcacccgcatatttcaccgcgttctccagcagattaatcagcacccgttcaaagagtggcccgtcaacgtggattaaggtcagcggttctggcagagaaagattgatgggcgacgataaacccggttccagcatttgcagcgcgctgccgactacttcttccagcgttaaccactctttcttcaaattaaagtcgccggactgaattcgcgccatatccagtagattattcaccagtcgggtagtgttcagcacatgctgacggatctcgctggcctggcgggcgtggggtgatccttcgcttgccagatcgagcgttaagatttctgcctgaccaaacagcaccgtaagcggcgtgcgtaaatcatgcgaaagcgccgccagcagggcgttgcggatctgttcacgttcgcttgccatccgcgcctgttcttcgctggcggttagcgtcagccgctcaagggcattggcgactaacagcgtaaacgtctccagcaggcgctgctgttccgggatcatcaactggcgcagattccccggctccaccaccaccagcccgtaggttttctcgccgctttttagcggcaaaatctggtacggtacaccgggtaacgtgtcggtgcccgcgcccgcaggcaggcctttatcaaaactccactgcgcgatggcatcgtcccacggcgtcattccttgcggatgtgttaacggctgcaatttaccgttgtcatcgggcaacaacacctgactgcgggcatgaaacgtggaggcaataaattgttcgctggtggcagcgatatcctgcggactgcggcccaccgccagagctttcgacatttcatataagtgccgtgtgcgttgctcgcggtaacgggctacccgcgcctgataacgcacgccagcagtaaggttcccgatcaccagcccgacggttaacatcaccgcgaaggtcagcagatattgcacatcagagacggcgagcgtgccgcgtggggcgataaaaaagagatcgaaactcactacattaatgacggtggcaaccactgaaggccagcgtccataaaatagcgccaccaccaccacgccaagcagatacagcatcaccaggttggcggcatcaaacgccatcagccactgcatggcaattaaggtgataacggcgcataacgcggcggcaaccacgcatccctgaatttgtacacgccacttgtctttaaaagagcggttatccggcgcgttgttaatcgtgcgggcgggtggttcatcaagcgcgaccagcacctgatcgagatcgggggcgatgcgcgccagtcggtcagcaaacgtttcccgacgccaccagcggcgcgaggccgggcgaccgagaataatcttgccgagattatgttcacgggcataacgcactaccgctttctcttccgctggatcagaaagtgttgccgtctccgcgcccagttcctgcgccagacgtaaggcgctgagaattgcccgacgttttttttccggtaagcggtgcagggcaggggtttcaacatacaccgcgtgccagacgctacccagccgtgacgccagccgcgccgctgcgcggaccagtttttcgctgccggtgttatggccgatgcataaaaggatcgcgtcgcgcgtgtgccacactttctcttcgccaggatgcccccgccaggcgcgcatttgctcatcaacgcgatcggcagtacggcgcagtgccagttcgcgcagggcgatcagattacctttgcggaaaaaatgttcaatggcgcgctccgcctgcccggcaatatagactttgccttctttcagccgctggcgcagatcgtccgggggcaagtccaccagcaccacgtcgtcggcggcatcgaaaaaaggatcgggcacggtttcccgtacctgaattccggtgacgccgctgaccacatcattcagactttccagatgctgaacgttgacggtagtgaaaacatcaatgccagcttccagcagttcttcgatatcctgccagcgtttgggatgacgggaacctggcgcattactgtgcgccagttcgtccattaagatcagcgccgggcggcgggcgagggcggcatcgagatcaaactcgctgatatgccgcccacggtacgcctggcgttttaacggcagaacagccagcccttccagcatggcggcggtatcttttcgcccgtgggtttctaccacgccaaccacaatatccagcccttgcgcccgcagtcgctgggcttctgccagcatcgcccaggtcttcccgacgcctgcacaggcaccgaagaaaactttcagcttcccccgatgcggcgcggcagtttgttccagcagacgatcggggtcgggacgtaagggttcgttattcatcaagtttatccagcgccagattgagttcaacaatgttgacaaccggctggccgatatatttcaccagcggttgttggctgtattttgcgatcagttgcgtgagctgttcaacgctgagattacgcgctttcgccacgcgtgggatttgccaggccgccgcttgcggggtgatattattgtccagcccgcttgccgatgccgtcaccagttcaaccggaacgctcgcgctggcatccgggttagcggcccgtaatgcagcaacgcgtgcggctattagtttatccagctcagggttactgaccgccagattgctcccgccagaagcctgtggattatagggcatttctgccgttgccgacgggcgaccatgaaaatagccgttgccggtaaaattctgcccgattaatgccgaaccgcgcaccgtatcaccttcacgaatcaacgaaccattggcctgccagggaaaccaccattgccccagtacggtggtcagcagcgggtaaacgccgccagtaatcaataacagaaagataaatgttgataatgccggacgtaatccactcatggtaaacctcacaccagaccgcaaacggtcagcagtaaatcaatgactttgataccgataaacggcaccagcagcccacccagaccgtaaatccataagttacggcgcaacatggcagaagcggtaagcggtttataactcacgccttttaacgccaggggaatcaaaaagacgataatcaaggcgttgaaaatcaccgcactgaggattgcggagtcgggcgaatgcaggcacatgatgttcagcgcatttaactgcggatacgttgccgcgaatgccgccggaataatggcgaagtatttcgccacatcgttggcaatgctgaaggtggtcagcgagccacgggtcatcagcatctgtttgccaatgtgcaccacctcgatcaacttggtcgggttagagtcgagatcgaccatattgcccgcctctttcgccgcctgggtgccggagttcatcgccaccgcgacatctgcctgcgccagcgccggagcatcgttggtgccgtcgccggtcatcgctaccaaacgaccttccgcctgatactgacggatcaatgccagcttggcctccggtgtcgcttcggcgagaaaatcatcgacacccgcttccgcagcaatcgcggcggcagtcagacggttatcgccggtaatcatcaccgttttaatgcccattttgcgcagctgggcgaagcgctctttaataccgcctttgacgatatctttcagcgcaataacgcccagcacacgagaaccttccaccaccaccagcggcgtggctccctgacgcgcaacctgatcgactttttgatcaacatcggtagggaagtgaccaccgttagcctcaacatggcgacgaatggcatcgacagaacctttacggatcatgcggttgtcgatgttgatcccgctcatccggctttgcgcagtaaacggtacaaaggtggcatggagcgactgcacatcgcgctcgcgcaggttaaaacgctgcttggcgaggatcacaatactgcggccttccggcgtttcatcagccagcgaagccagttgtgcggcgtcagccagcgttttttcatccacgccctgcgcggggataaactccgacgcctgacggttaccgagtgtgatggtgccggttttatccagtagcagaacgtcaacgtcacctgccgcttcaactgcacgtccgctggtggcaatcacattcgcgcctagcatccggctcatcccggcgacgccgatcgctgacaacaggccgccaatagtggttgggatcagacagaccagcagcgccaccagtaccgttacgctgactgcattaccgccccacgcggaaaacggccacagcgtggcggttgccagtaaaaagacgatagtcagggcaatcagcagaatggtcagggcaatttcgttcggcgttttgcgtcgctgtgcgccttccaccatcgcgatcatccgatccagaaatgtctcgccggggttaacgctacactcaatcaccagccagtcagaaagaatacgcgtgccgccggtgacggaggcaaaatcgccgccggattcacggatcaccggtgccgattccccggtgatggcgctttcatcgaccgatgcacccccttcaataacttcaccatcgcaggggataatatcgccagcttctaccagtacgatatcgcctttacgaagttggtcggcaggaactttgtccgccgcagcgccatatttcggctcacgcagcttgcgggcaaaggcagtttttttcacccctttcagactgttggcctgcgctttactgcggccttctgccagcgcctcggcgaaattagcgaacagtacggtgatccacagccaaccgctaatggccgcgctaaacagcgcattgccgggcatcgcaccgcttgccatcgcgatgctaatacaggtggtcagcagactgccgatccagacgataaacatcaccggattgcgccattgcgcctgcgggtttaattttttcaccgcttctttcagcgcctgaacgacaagtgttggttcgaatagcgccagttgtttacgactcatattcagtgctcactcaatatcatcaggagagatattccgccaccggaccaagcgccagggcagggataaaggtcagtgcgccaaccagcaacacggtgccgattaacaggccaacaaacagcgggccgtgcgttggcagcgtgccggagctggcggcttggctctttttactcaccagcgaaccggcaattgccatcaccgggataatcaccccgaagcgaccgacaaacatgcagaacgccagtaaacagttccagaacggagagttggcgcttaatccggcaaaggcgctgccgttgttgttagcggcggatgacacggcgtacagcacttcgctaaaaccatgcgggccagggttgagcatggcgctacgtccggcgtcggtcatcatcgccaacgccgcgcccatcagcaccagcgtcggggtaaccagaattgccagtgcagtcagtttcatctcgcgtacgtcgatttttttacccagatattccggtgtacgaccaatcatcagcccggcaataaacaccgccagcaggacaaacagcatcatgccgtaaagaccagaaccgacaccgccgaacaccacttcaccaatttgcatcagccacatcggcaccatgccaccgagagcggtaaacgaatcatgcatcgcaatcaccgcgccacaggaagccgccgtcgtcacgaccgcaaacaggctactgaccagcacgccgaaacggctctctttaccttccatattgatgctgctgtccgtgcccagtgccagcagatgaggattaccctgaacttctgcccacatcaccacgcctacgcagatgacaaaaatcactgacatcgcccacagcaacatgcgcccctggcggcgatcgcccgtcacttcaccaaaggcaaagcacagcgccgttgggatcaagaagatcgccagcatctgcacgaagttggtcagtgcggttgggttttcaaacggatgcgacgagttggcattaaagaagccaccgccgttagtaccgagcatcttgatcgcttcctgagaagctacaggccccatgggtaacagctgttgcgctccttcaacggtattcacagcctgataaggcagaaagttttgcagcgcaccttgttgaataaaaaacagtgcaatcaacaacgccacagggactagcacccataacgtgatgcgtagcagatcgacccaggcattcccgagcgtgctcatgctctggcgggtaaacgcacggatgagggcaaaaatcaccgcaatcccgctggcggcagaaagaaagttttgcaccgttaagcccgccatctggctgaaatagctcaacgtggtttcaccgctataagattgccagttggtattggtgacaaagctgacggcggtattcagcgccagatcccacgacagccctggcaactgctgtggattaagcggcagatagtgctgaccgagcaacataaaaaacagcaccgccagccccagcatgttcaggccgagaatggcacaaagatattgcttccagttcatctcacggtcagagacgccaagtgcgcgaaaaagtacgcgctcaacgcccgttgtaccgggaagaggaatgtcattaatcagccgcgccagcccgctgcctaaaggacgcgccagcaccattaacaccagtaaaaacgtggcgatcagtaagaacccttgcgcagccatcagaacgcctccgcattgatcagggcataaaccagataacccagtaataaaaacaccagcaatacgccggttatcacgcctgcactcacagtgcacctccagtggcctaaaagtgataccggaagggtagaattctggctgcaaagatttcgcaaaaatctgcgggcggggtgtaaaaaaagtataaaaatggcaaaagccatgatttaactaatgtttagtattaatttaacttttgtgtaacttaattacaggatgaatgtaaataaaccatcaataagcaaaaataagtggtcggatgagtagtaaaattacacaaaaggcggtactattttcatcagataaacaaattcatttttccggtgccattcaccgggtagatacaaaagggggagaaaagtatggaactctacagagaatatcctgcatggcttatctttttacgccgtacttatgcggttgcagcgggcgttctggcgctgcctttcatgcttttctggaaagaccgcgcccgcttttacagctacctgcatcgcgtctggtcgaaaaccagcgataaaccggtgtggatggatcaggccgaaaaggcaactggtgatttttattgattgctgagttttgaatacattgaaaaccgccagcggaaacgctggcggttttttgtatcaggaagatgttcagaggaatatttagacatcgttataccaatcgaaacatatattcatgaaatatatataaatattttcctaattgttcttatctgacagatatctcacttaaggctttcttataaatctgtagggtttcgcctgtcagcagacaaataacccgataaaacaaggatgagcagatgagcggaaaaccggcggcgcgtcagggcgacatgacgcagtatggcggtagcattgtccagggttcagccggggtacgcatcggtgcccccaccggcgtggcctgttcggtgtgccccggcggggtgacgtccggccatccggtcaatccgctgctcggtgcaaaggtccttcccggtgaaaccgacatcgccctgcccggcccgctgccgttcattctctcccgcacctacagcagttaccggacaaaaacgcccgcgccggtggggagcctcggccccggctggaaaatgcctgcggatatccgcttacagctgcgcgataacacactgatactcagtgataacggcggcagaagcctgtattttgagcacctgtttcccggtgaggacggttacagccgcagcgagtcactgtggctggtgcgcggcggcgtggcgaaactggatgaaggtcaccggctggccgcactctggcaggcgctgccggaagaactccgcttaagtccgcatcgttatctggcgacaaacagtccgcaggggccgtggtggctgctcggctggtgtgagcgggtgccggaagcggatgaggtgctgcctgcgccgctgccgccgtaccgggtactgaccgggctggtggaccgcttcgggcgcacacagacgttccaccgcgaagccgccggtgaattcagcggcgaaatcaccggcgtgacggatggtgccgggcgtcacttccggctggtactgaccacgcaggcgcagcgggcagaagaagcccggcagcaggccatttccggcgggacggaaccgtccgcttttcctgataccctgccgggttacaccgaatatggccgggacaacggcatccgtctgtctgccgtgtggctgacgcacgacccggaatacccggagaatttacctgccgcgccgctggtgcgctatggctggacgccccgcggcgaactggcggcggtgtatgaccgcagcaatacacaggtgcgcagctttacttacgatgataaataccggggccggatggtggcgcaccgtcacacgggccgaccggaaatctgttaccgttacgacagcgacgggcgggtgacagaacagctaaacccggcaggcttaagttacacgtatcagtatgagaaggaccgcatcaccatcaccgacagcctgaaccgccgtgaagtcctgcacacgcagggtgaaggcgggctgaagcgggtggtgaaaaaggaacacgcggacggcagcgtcacgcagagtcagtttgacgcggtgggcaggctcagggcacagacggatgccgcaggcaggacaacagaatacagtccggatgtggtgacgggcctcatcacgcgcatcaccacgccggatggcagggcatcggcgttttactataaccaccacagccagttaacgtcagccaccgggcctgacgggctggaaatacgccgggaatatgatgaatggggccgtctgattcaggaaactgcccctgacggcgatatcacccgctaccgttatgataatccacacagtgacttaccctgcgcaacggaagatgccaccggcagccggaaaaccatgacgtggagccgttacggtcagttgctgagcttcactgactgttccggttatgtaacccgctatgaccatgaccgttttggtcaggtgacggcggtgcaccgcgaggaagggctgagtcagtaccgcgcatacgacagccgtggacagttaattgccgtgaaagacacgcagggccatgaaacgcggtatgaatacaacgccgccggtgacctgaccaccgtcattgccccggacggcagcagaaacgggacacagtacgatgcgtggggaaaagccatctgtaccacgcagggcggtctgacgcgcagtatggaatacgatgctgccggacgggtcatccgcctgaccagtgaaaacggcagccacaccaccttccgttacgatgtactcgaccggctgatacaggaaaccggctttgacggccgcacacagcgttatcaccacgacctgaccggcaaacttatccgcagcgaggatgaggggctggtcacccactggcactatgacgaagcagaccgcctcacgcaccgcaccgtgaatggcgaaaccgcagagcggtggcagtatgacgaacgcggctggctgacagacatcagccatatcagcgaagggcaccgggtgacggtgcactatggttatgacagtaaaggccgcctcgccagtgaacacctgacggtgcatcatccgcagacgaatgaactgctctggcagcatgagaccagacatgcgtacaacgcacagggactggcgaaccgctgtataccggacagcctgcccgccgtggaatggctgacctacggcagcggctggctgtcaggcatgaaactcggcgacacaccgctggtggagtacacccgcgaccgcctgcaccgggaaacgctgcgcagcttcggccgttatgaactcaccaccgcttatacccctgccgggcagttacagagccagcacctgaacagcctgctgtctgaccgcgattacacctggaacgacaacggcgaactcatccgcatcagcagcccgcgccagacccggagttacagctacagcaccaccggcaggctgaccggcgttcacaccaccgcagcgaatctggatatccgcatcccgtataccacagacccggcaggtaaccgcctgcccgacccggagctgcacccggacagcgccctcagcatgtggccggataaccgtatcgcccgtgacgcgcactatctttaccggtatgaccgtcacggcaggctgacagagaaaaccgacctcatcccggaaggggttatccgcacggatgatgagcgcacccaccggtaccattacgacagtcagcaccggctggtgcactacacgcggacacaatatgcagagccgctggtcgaaagtcgctatctttacgacccgctgggccgcagggtggcaaaacgggtatggcggcgtgaacgggacctgacgggctggatgtcgctgtcacggaaaccgcaagtgacctggtacggctgggacggcgaccgcctgaccacgatacagaacgacagaacccgcatccagacgatttatcagccggggagcttcacgccactcatcagggttgaaaccgccaccggtgagctggcgaaaacgcagcgccgcagcctggcggatacccttcagcagtccggcggcgaagacggtggcagtgtggtgttcccgccggtgctggtgcagatgctcgaccggctggaaagtgaaatcctggctgaccgggtgagtgaggaaagccgccgctggctggcatcgtgcggcctgacggtggcgcagatgcaaagccagatggacccggtatacacgccggcgcgaaaaattcacctgtaccactgcgaccatcgcggcctgccgctggcccttatcagcacggaagggacaacagcgtggtacgcagaatacgatgaatggggtaacctgctgaatgaagagaacccgcatcagctgcagcagcttatccgcctgccggggcagcagtatgatgaggagtccggcctgtattacaaccgccaccgctattatgacccgctgcaggggcgatatatcactcaggatccgattgggctgaaagggggatggaatttttatcagtatccgttgaatccgatctcaaatatagatccattaggattagaaacactaaaatgcattaagccactgcattcaatgggcggaactggtgaaagaagcggtccagatatatgggggaatccgttctatcatcaatatctttgtgtcccagatggtaaaggggactatacttgtggtggccaagaccaacggggagaatcaaaaggagatggtctatgggggccaggtaaagcaagtaatgatacaaaagaagctgctggccgttgtgacctcgttgaaaccgataatagttgtgtggagaactgtttaaaagggaagtttaaagaggtaaggccgcgttattctgtattgcctgatatattcacacctataaatttagggctatttaaaaactgccaagactggtctaatgattctttagaaacatgtaagatgaagtgctccggaaataacattggacgttttattagatttgtattcaccggagtgatgtaatgaaatatattatttttttattcagagctatatggctggctttatcgcttttaatactattcttttccatgcatagactttcactattagactccactcgtgatgtgagcgagttaattagtctcatgtcttatggaatgatggtaatatgttttccaacaggcatagtattctttattgctctaatatttatagggactgtatcagacattattggcgtaaggattgatagtaagtatattatggcgataataatatggctttattttctgtcaggagggtatattcaatggtttgtattaagtaagcgcattataaacaaataaattaagttaattgctcttattattatatgtaacctgggcattgatatcccgtatgccacagacccggcaggtaaccgcctgcccgacccggagctgcacccggacagcaccctcagcatgtggccggataaccgtattgcccgtgacgcgcactatctttaccggtatgaccgtcacggcaggctgacggagaaaaccgacctcatcccggaaggggttatccgcacggatgatgagcgcacccaccggtaccattacgacagtcagcaccggctggtgcactacacgcggacacaatatgcagagccgctggtcgaaagccgctatctttacgacccgctgggccgcagggtggcaaaacgggtgtggcgacgtgaacgggacctgacgggctggatgtcgctgtcacggaaaccgcaagtgacctggtacggctgggacggcgaccgcctgaccacgatacagaacgacagaacccgcatccagacgatttatcagccggggagcttcacgccactcatcagggttgaaaccgccaccggtgagctggcgaaaacgcagcgccgcagcctggcggatacccttcagcagtccggcggcgaagacggtggcagtgtggtgttcccgccggtgctggtgcagatgctcgaccggctggaaagtgaaatcctggctgaccgggtgagtgaggaaagccgccgctggctggcatcgtgcggcctgacggtggagcagatgcaaaaccagatggacccggtgtacacgccggcgcgaaaaatccacctgtaccactgcgaccatcgcggcctgccgctggcgcttgtcagcacggaaggggcaacagaatggtgcgcagaatacgatgaatggggcaacctgctgaatgaagagaacccgcatcagctgcagcagcttatccgcctgccggggcagcagtatgatgaggagtccggcctgtattacaaccgccaccgctattatgacccgctgcaggggaggtatatcactcaggatccgattgggctgaaggggggatggaatttttatcagtatccgctgaatccggttcagtatatagattcaatgggactggcatcaaaatatggacacttaaataatggcggatatggagcgagacccaacaaaccgcctacgcccgatccaagtaaattgccggacatagcgaaacaattaagactgccatatcctattgaccaggccagtagtgcgcctaatgttttcaaaacattcttcagagcattaagcccttacgactacacactgtattgcaggaagtgggtaaaaccaaatctgacttgtacgccacaggatgattcccagtatccagggatggatacaaagacagcaagtgattacctgccacagacaaattggccaacaactcaattaccaccaggatatacttgtgcagaaccctatttattcccagacattaataaacccgatgggccagcaacagcagggatagatgatttgggtgaaattttagctaagatgaaacagagaacatcgagaggaataagaaaatgaaaagagttttgttctttttgctgatgatatttgttagttttggtgttatagctgattgcgaaatacaagctaaagatcatgattgttttactattttcgctaagggtactattttttccgcgtttcctgtcttaaataataaagccatgtggagatggtatcagaatgaggacatcggtgagtattattggcaaacagaactgggtacatgtaaaaataataaattcacaccaagcggggcgagactcttaattcgcgtcgggtcactacgccttaatgaaaatcatgccatcaaaggaacgttgcaggagttgataaatacagcagaaaaaacggcgtttctcggcgatcggtttagaagttatataagagcgggtatctatcaaaaaaagagcagtgatccagttcagttgttggcagtccttgataattcaatcatggtaaaatattttaaagatgagaaaccaacttatgctcgaatgacagcacatctcccgaacaaaaatgagtcttacgaatgtttaataaagatacagcatgaactaattcgtagtgaagagaaataaaatctcttcctgagaaaacaaattaatcattgtgaaaaattatataactcatggaataggtgtttattttgcgttccatttgcagggaaagatcacgtaacgctacttttttgtactaaataattcgaattttaagttcaacaattgagatactacttattgtctaaagctgtttttcatagcttatacatgatcaaatactccttacataaataaggtgaacaaatggaacttaaaaaattgatggaacatatttctattacacccgattacagacaagcctggaaagtggtgcataaattgtcagatattctactgttgactatttgtgccgttatttctggtgcagaaggttgggaagatatagaggatttcggggaaacacatctcgattttttgaagcaatatggtgattttgaaaatggtattcctgttcacgataccattgccagagttgtatcccagggaaagatcacgtaacgctacttttttgtactaaataattcgcattttatgtttaaaaattgagatattccttattacctaaagctgtttttcatagcttatacatgatcaaatactccttacataaataaggtgaacaaatggaacttaaaaaattgatggaacatatttctattattcccgattacagataagcctggaaagtagagcataaattgtcaggcatcctactattgactatttttgccgttatttctggtgcagaaagttgggaagatatagaggatttcggggaaacacatctcgatttcttgaagcaatatggtgattttgaaaatggtattcctgttcacgatactattgccagagttgtatcctgtatcagtcctgcaaaatttcacgagtgctttattaactggatgcgtgattgccattcatcaaatgataaagacgtcattgcaattgatggaaaaacgctccggcactcttatgacaagagtcgccgcaggggagcgattcatgtcattagtgcgttctcaacaatgcacagtctggtcatcgggcagatcaagacggataagaaatccaatgagatcacagctatccctgaacttcttaacatgctggatattaaaggaaaaatcatcacaactgatgcgatgggttgccagaaagatattgcagagaagatacaaaaacagggaggtgattatttattcgctgtaaaaggaaaccaggggcggcttaataaagcctttgaggaaaaatttccgctgaaagaattaaataatccagagcatgacagttacgcaatgagtgaaaagagtcacggcagagaagaaatccgtcttcatattgtttgcgatgtccctgatgaacttattgatttcacgtttgaatggaaaggactgaagaaattatgcgtggcagtctcctttcggtcaataatagcagaacaaaagaaagagccagaaatgacggtcagatattatatcagttctgctgatttaaccgcagaaaagttcgccacagcaatccgaaaccactggcacgtggagaataagctgcactggcgtctggacgtggtaatgaatgaagacgactgcaaaataagaagaggaaacgccgcagaattattttcagggatacggcacatcgctattaatattttaacgaatgataaggtattcaaggcagggttaagacgtaagatgcgaaaagcagccatggatagaaactatctcgcgtcagtccttgcggggagcgggctttcgtaatctttccctgctttttgtactaaataattcgcattttatgtttaaaaattgagatattccttattacctgaagctgttttttattgcttatacatgatcaaatacttcttacataattaaggagaacaaaatggaacttaaaaaattgatggaacatatttctattatccccgattacagacaagcctggaaagtggaacataaattatcggatattctactgttgactatttgtgccgttatttctggtgcagaaggctgggaagatatagaggattttggggaaacacatcccgattttttgaagcaatatggtgattttgaaaatggtattcctgttcacgataccattgccagagttgtatcctgtatctgtcctgcgaaatttcatgagagctttattaactggatgcttgactaccattcttcagatgataaagacgtcatcgcaattgatggaaaaatacaccggcattcttatgacaagagtcgccgtaagggagcgattcatgtcattagtgcgttctcaacaatgcacagtctggtcatcggacagatcaagacggataagaaatccaatgagatcacagctatccctgaacttcttaacatgctggatattaaaggaaaaatcatcaaaaccgatgcgatgggttgccagaaagatattgcagagaagatacaaaaacagggaggtgattatttattcgctgtaaaaggaaaccaggggcggctaaataaagccttcgaggaaaaatttccgctgaaagaattaaataatcccaagcatgacagttacgcaattagtgaaaagagtcacggcagagaagaaacccgtcttcatattgtttgcgatgtccctgatgagcttattgatttcacgtttgaatagaaagggcagctatggttagaaactacctgacgtcagtccttgcggggagcaggctttcgtaaatttgtcctgctacaacaggattaacttcacaaatatcatttctcaacgtctacacttactcctgtaaaccgctcaggagcagtaatgaatctacaacgatttgatgacagcaccctaatccgtatctttgcccttcatgagttacatcgactgaaagaacatggcttaacgcgcggggcgcttctcgattatcacagccgctataaactcgtctttctggcgcattctcagccggagtaccgcaaacttggcccgttcgtggctgatattcaccagtggcaaaatctggatgactattacaaccagtaccgccaacgcgtagttgttttgctttctcaccccgccaacccgcgcgatcacaccaatgttttgatgcacgttcagggttattttcgcccgcatattgattccacagaacgccagcagctggctgcgcttatcgacagttatcgccgtggcgagcaaccacttcttgcgccgctgatgcgtatcaaacactatatggcgctttatcctgacgcctggctttcagggcagcgttatttcgaactttggccgcgtgtgattaacttgcgccattcaggagttttatgactacccatctggtctggtttcgccaggatttacgtctgcacgataatctcgcactggctgccgcctgccgcaattcgtctgcacgcgtgctggcgttgtatatcgctacaccacgccagtgggcgacgcataacatgtcgccgcgtcaggctgaacttatcaatgctcaactgaatgggctacaaatagcgcttgcggaaaaaggtattcctttattgttccgtgaagtggatgactttgtcgccagtgtcgaaatagttaaacaggtgtgcgcggaaaacagcgttacccacctgttttataactatcagtatgaagtgaatgagcgggcgcgggatgtggaagttgaaagagcgctgcgtaacgtggtgtgtgaaggatttgatgacagcgtgatcctgccgcctggcgcggtgatgaccggtaatcacgagatgtacaaagtctttacgccttttaagaatgcctggctgaaacggctgcgggaagggatgccggagtgcgtcgctgcgccaaaagttcgtagtagcggatcgatagagccctcgccatccattacgctgaattatcctcgtcagtctttcgatactgcgcattttccggtggaagaaaaagcggcgattgcgcaattacgccagttttgccagaacggtgccggagaatatgagcaacaacgagattttccggcagtggaaggcaccagccgtttgtcggccagcctggcaacgggcgggttatcgcctcgccagtgcttgcatcgcttgttggctgaacagccgcaggcgctggacggtggggccggtagtgtctggcttaatgagctgatctggcgcgagttttaccgtcacctgataacgtatcacccctcgttgtgtaaacatcgtccatttattgcctggacggatcgtgtacagtggcagagcaatcccgcacatttacaggcctggcaggaaggcaaaacgggatacccgattgttgatgccgctatgcgtcagcttaacagcactggctggatgcataacaggctacggatgattacagccagttttctggtgaaagatttattgatcgactggcgcgaaggcgagcgatatttcatgtcgcagctgattgatggtgatttggcagccaataacggtggctggcagtgggccgcttcaaccggaaccgatgcagcgccgtattttcgtattttcaacccgacaacccagggcgagaaatttgatcatgagggcgagtttatccgccagtggctaccggaactgcgcgatgtgccagggaaagtggtgcatgagccgtggaagtgggcgcagaaagcaggtgtgacgctggattatccgcaaccgatagtcgagcacaaagaagcgagagtacaaacgttggcagcgtatgaggcggcgcggaaggggaaataacagacgcgtcaggcaatcgagcccagatgccggatgcggcgtgaacgccttatccagcctacaaatttgtgcaaattcaataaattgcaggaaatacgtaggcctgataagacgcgtcaagcgtcgcatcaggcatcggtgctggcctattaagactccagcgccagcgcgcggtttctgaatttcagcgcctgatacagccaaatcatcagtaccagtcctacacacgccagtgcgccccaggtaatttgatcaaatacttcaatatatgcattgatggagtagttgatcgccccggaagcatcaaacgaagcctgcgatgtctgatcggcaatcacgcccgccagatagttcgcgatcgcgccagaaagcagcatgtagatgccggttaatacgccggtcacaccggggatttcaatgcgcgtaatttgcgacatggcaaccgggtcgataaacagttccgcaaagcccatcaccgccaggcctaataccatcagtggcagagaagagtgaccatacattgcggaccagcgggcgcttaaggtcagaatgcagaatccggcgctcatcaggccaaggccaagagcaaatttcccccagatgcgcacggtacgattacccgcgacactctcttttaccacccacgccaggaacacaccgcacagcataactgcgaaggcattaatcgactggaacatcgcggtcggaacggtataaccaaacatatcgcggttaacgaagcggtcgatataaaggctaatcgagctaccgccctgttgtgcgaaggcccagaacaacatactgaagaaggtgagcgtcacaatcagccccagctccttccgctgtttctggttttctgctttgcgataaatttttgccagtacacccaggccaataatagtcgcgacaattaaggcgtataccgaccactctttccagaacagtatggtaatcagtgcaggcgttgccaccagcagaaccagcagccatccccagttcggcaggagaaagtttgtcgcacgcagtacttttttgttaacgccgcgggtatgagtgaaatgacgattgccacataagaaaatgaccagacccgcgatcatgccaaccgccgccaggccaaagcccatcgcccagctgtactcttcctgggcgtaaccacaggcgataggtgcgataatagaccccacgttacccgccgcatacatcagcgagaaaccgccatcacgacgcggatcggttggctcatacagctcgccgagcagacagcttacgttagatttaaacaggccatagccgcagacgataatcgccagggacagatagaggaatgacggatggatctcactggcacccagcaccacatgaccgatcgccatcaacaacgcccccagcatcaccgccatgcgattgccgagaactttatccgccaaaaagccaccgaggattggcgtgacatacaccagcgaacagtaggcgctaaataactcgtaggcgtgagtatcgttgtattttagttgattggtgagatagagaatcagcagggcacgcatgccgtaaaagctaaaatattcccagatttgcagcgcaacgacatagtaaatagcgcgcggctgtgatgcgtgtttattcataataattccacaattgacggcaacgtcacgtaatagttgcgcggcgtgcttgtgtttccttaaagttaaaactttgatacagatctgattatttatgcaatatgctgtctgattgcataaatatacattagctgaagcgtgatgatataaacaatttgcgtcttttggcgtcgggtttgtttcttaatatgtcaaaagattggctatcgacgaactggcgaggtaacgctatgttaacggtgtagctatcagaatacggaaggcgcgaagatgaaaaacaccgaactggaacaactgattaacgaaaaactgaacagcgcggcgattagtgattacgcgccgaatggtttgcaggtggaaggcaaagagacggtgcaaaaaattgttaccggtgtcaccgccagccaggctttgctcgatgaggcagtgcgtctgggcgcggatgcggtcattgtgcatcatggctacttctggaaaggagagtctccggtcattcgcggaatgaagcgtaaccgtttaaaaacgttgctggcgaatgatatcaacctgtatggctggcatttgccgcttgacgcacatcctgagctgggcaataacgcacagctggcggcgttactggggatcacggtcatgggcgaaattgagccgttggtgccgtggggcgaactgaccatgcctgtgccgggactggagctggcttcctggattgaagcgcgtctgggacgtaagccgttatggtgtggcgataccggacctgaggtggtccagcgcgtcgcctggtgcacgggcggcgggcaaagttttatcgatagcgccgcgcgttttggcgtggatgcttttattactggcgaagtttctgaacagaccattcattcagcccgcgagcagggattgcatttttatgctgcaggtcaccatgccactgaacgtggtggtattcgcgcattgagcgagtggctgaatgaaaataccgatcttgatgtgacctttattgatattcctaatcctgcataacgaataatcagagggatcgaaagtgcaacgagcgcgttgttatctgataggtgaaacggcggtagtgctggaactggaaccgccggtgacgctggctagccagaaacggatctggcgactggcgcagcgtctggtggatatgccgaatgtggttgaagccattcccggcatgaacaatatcacggtgattttgcgtaatcctgagtcgctggcgctggatgccatagagcgtttgcaacgctggtgggaggagagcgaggcgctggagccggagtctcgctttattgaaattccggtggtttacggtggtgcaggcggaccggatttggcggtggtcgcggcgcattgcgggttgagcgaaaaacaggttgttgaattgcactcctccgtggaatacgtggtctggtttttaggttttcaaccgggcttcccgtatctcgggagtttgccggaacaactacacacgccacggcgcgctgaaccgcgcttactcgttccggcaggttctgtcgggatcggcgggccgcagactggtgtttatccgctggcaacgccgggtggctggcagttgattggtcatacctcactcagcctgtttgatccggcgcgtgacgaacccatcttattacgtccgggagacagcgtgcgctttgtaccgcagaaggagggagtatgctgaagattattcgtgcgggcatgtataccactgtgcaggatggcggtcgtcacggttttcgccagtcgggtatcagccactgcggcgcactggatatgcccgcgttacgcattgctaacctactggtgggtaatgacgccaatgcccccgcgctggagatcacgctcggtcagttaactgttgagttcgaaactgatgggtggtttgctctgacgggtgccggttgcgaagcgcggctggatgataatgccgtctggaccggctggcgattgccgatgaaagcaggccagcgtttaacgcttaaacgcccgcagcacgggatgcgcagttatctggcggtcgcgggtggtattgatgttccgccggtaatgggctcatgcagcaccgatctcaaagtggggattggcgggctggaaggccgtttactgaaggatggtgaccgactcccgattggcaaatcgaagcgtgattctatggaagcgcagggcgttaaacagctgctgtggggcaaccgcattcgcgccttgccggggccggaatatcatgagttcgatcgcgcctcgcaggatgcattctggcgttcgccctggcagcttagctcgcaaagtaaccgcatgggctatcgcttacaggggcaaattttaaaacgcaccaccgatcgcgaactgttatctcacggtttgttaccgggcgtggtgcaggtgccacataacgggcagccgattgtgttgatgaacgacgcacagaccaccggtggttacccgcgtattgcctgtatcattgaggctgatatgtaccatctggcgcaaattccgctcggtcagccgattcattttgtccagtgttcactggaagaggcactaaaagcacggcaagatcagcaacgttattttgaacaattagcgtggcggctgcacaatgaaaattgacctgaacgccgatctgggcgaaggctgcgccagcgacgcagagctattaacgctggtttcctctgccaatattgcctgtggatttcatgcaggcgatgcgcaaatcatgcaggcttgcgtgcgtgaagcaataaaaaatggtgtcgcgattggcgctcacccgagttttcccgacagggaaaattttggtcgcagcgccatgcagctgccgccagaaaccgtttacgcccagacgctgtatcaaattggcgcgctggcaacgattgcccgtgcgcaaggcggcgtaatgcgtcatgtcaaaccgcacggcatgttgtacaaccaggcggcgaaagaagcacaactggcagacgccatcgccagagcggtatacgcttgcgatccagcattgattctcgtcgggctggcgggaagcgagctgattcgtgcaggcaagcaatatggtctgacaacgcgcgaggaagtgtttgccgatcgcggttatcaggctgacggctcgctggtgccgcgaagccagtcaggcgcgttgattgaaaacgaagaacaggcgctggcgcaaacgctggagatggtgcaacacggcagagtcaaaagtatcaccggcgaatgggcaacggtcgcggcgcaaacggtctgcctgcatggcgacggcgagcacgcactggcgttcgcccgccgactacgctctgcatttgccgaaaaggggattgttgtcgcagcataaccccgattaataaagaatgaaaaaaggatatcaccatgcctgaaggcccggagatccgccgtgcagcggataacctggaggcggcgatcaaaggcaaaccactaactgatgtctggtttgccttcccgcagttaaaaccttatcaatcacaacttatcggtcaacacgttacccatgtggaaacgcgtggtaaggcgttgttaactcatttttccaacgacttaacgctctacagccataatcagctttacggcgtctggcgcgtggttgataccggcgaagagccgcagaccacgcgagtattgcgggtaaaactgcaaacggctgacaaaaccattctgctttatagcgcctcggatattgagatgttgaccccggaacaactgaccacgcatccgtttttacaacgcgttggtcccgatgtgctggatccgaatctgacgccggaggtggtgaaagaacgattattgtcgccgcgctttcgtaaccgtcagtttgctggattactgctcgatcaggcgtttctggctgggcttggcaattatttgcgggtggagatcctctggcaggttgggttgactggaaatcataaagcgaaagatctcaatgcggcgcaactggatgcactcgcacacgcgttactggagattcctcgattttcctacgctacgcgggggcaggtggatgagaataagcatcatggggcgctgtttcgctttaaggtttttcatcgagatggcgaaccgtgcgaacgttgtggcagcatcattgagaaaaccacgctgtcatctcgcccgttttactggtgccctggctgccagcactaggccgaccgcttcggcgcataggttgaaataaaccgcgcaatggcaggccctgtcagcaaaatactgaacaggcgtagggtttgcatcgccataatgagcgccatatcggcattgctccctgcggcgatgaccgccacggtatcaagcccgccggggctggtggcgaggtaggcagtcataaaatcaatgtgcataaaccgggtcagcccccacgccatacccgcacaaatagccagcagagcaaaaatcgacagcaggatttgcggtagcgggcgtagtgcccgcagtaagatttgtttatcgaaaccaagaccaatccgccagccaattgccatatacgccatcgccagcagccattccggtagttcgatggtgatgagctgaccagactggagcactgcgcccgccagcatcgggatgagcatcgtgccggaaggaagacgcagcaggcatcccactgtaccggcaacgaccgcgagcaaaatagtaagcaggagattaatgctcactggcgggaaccagacgatatgctggttaaccgcttcagcgttatcgcccagcatcatgcgggtgaccagaacagcggcccccgcgacgaacagcactcgcagatattgcataaacgccaccaggcgaatatctgcgccgtaatcttgcgccatagcgaccattgccgccgcgccgccaggagaggagccccaggcaccggtatttccaggcaatgagctatagcgcaccaataaccaacccacaatggcgctggaaagcagcgttaccagtaaaattgcaagcacgatcggccagttgacggccagggtggtgagaatcgaaccagtgaggttttgcgcaatcatgcagccaagaatggcctgggcggcgagaaaagcagagcggggaagttgcagagtaattccgcgcatactaaagatgatcccggcgatcatcggcccaagtaatagcgccgccgggagatgtaccgcgaggaaaccaatagaaaggagaagtgatagcacacataacattccccactgcaaaactggcatccttcgctccctcattattttctctttggtgtatcgatacagcataaagaaagctgggccaggaaaaaataacagcaatcaaggaaaaggggaaaatcagcaattttctgaaagagatgccctttccggcggcaaagggcatcatggtaaatcagttatagttaatcttaaaaagcaccactgtatcgaaggggccagcctcgatgggggtgcctggaatggacgaaagttcagccgtataggttttttcgtagaccaacatgtcactggtgaaatcggcgtattcagcatatttattgaaggtataaggcgaggcgttttcatccagtaaacgtagcttcagaccattaccaatcaacaatgctttatcttcttcaaccaacgtttcttcggtataaaaggaggaactgactttaaatccgtcggtgcattgatcgttttggctcttggtcgttttaatactgaacgttttcgacattgtgtggcgacgtatatccagcaaattaaatttaccaaaatcaatcacctgtgtttccggtgaaatggaaaaattgacgctgcaatccagcacgcgaatgttttccagaccagtaatatgatatttcaggttttgggcagtagggtcttcgttaacgctaccggcaccgtcaaattgcacgacgatatagtcgctaagcgtactttgataatcatgcggcggcatttctcgtattttgacgtataaccgcatgcgagcgagaaaggtacgcgacatatgaatattagcgggatcgcccgagcaaattttgttctgccatcccatcgcgatgatctgctcaggggtataaatatcaatgttcttactgtcgatacactggttagtgtcgatgcgactttttcccagactggcatcgtaatcgacaccgttgtatgtcacgccgagttgataataacgatcctgcacccccggataggggtttacccaggcgtagacatgctcgctttcaaagttgccgttggtattgttgtcacaatagacgggaattttaatatcgtcagattcccagatcttatcaccgggtttggcattgcctggtacagcaaacggttgaatcgcttctgatttttctactgcgccaccagatgtaccaaaatagcagttcagcgccattgcagacttcaacggcagaaataacaggcagatgacgagcaacaatcccttgccagcactcatttcgcctccactgcttgtaaacggcattgtccgctgcagttgagcgtcgtcatgcgtaatgcgccgtaatcatccatgtaaccgagataaaactggctgccgctataacttccggtgtttgtgttgaccgtactaaaaggtgcaaccatcacggttttgaagcctgggagaacgcctttttcatttctccccagataggcaatggtcagataatacgcggtaggatttttcagtgtcagttggttgccctgctggctgacctgtaactgcagttcgaccttttctcctgctttcttgcgtaatgcagccggtcgccagaacaatttaatacgactttgaatagcgacctgaagtatcgcatggtcgctgcttttatccggagcgggaggaatttcgcgcatattgtagaaaaatagcgtttcgcgatcgccaggtaattgtgtggttgaggcttgtttcacaacccgcacctgcgatgtcgctttcggttccagacgttgaatagggggcaaagcgaccagaagagcatcgcttttctcccctttttcattttctatccaggaataagcaagataaggcagtttgtcactttggttttcgatacgcaggctggtggctttgtcattggcgttaaacacaatgcgtgtgcgatcgggttgcaccgcagcattgcaacccaagctgatggttaacaacattaagggtaatcctttaataaatgtcattctcttttccttaattaatgacaaggtaaaatcaggcgtttggtcgtgtcttccagacgttctggcagatgaataatgcagctttgctcaccccagaccacggtaaacagttgattttcagcgacaccgcttaaccaggcatgtccttcctcgccaaccatacccacgctaatgccgctgtcatcctggcggatatccgcaccgaggggagggaactgaccgctggcgttgcgtatgatgacgttaacgtctttaccggaacgggaagccagtgatttgtaacctatcgcgccttcaatccatgtttccttgatgacgttttctgcaactgttacgccgtcgggtaagtcattcatgttcaccgccacggtggaaggctggtaactggaaatcaacggcaccaccgcaatgccaaaatggttggtgtagtcgagattgccctgaaccggaatatctgccacgccatcggtgctgaccatcaggcgtggttcattggtggagctgcggcgatgaaatgctgcaccatattgggttgcggtgaaagaaccgctccagctgctgctgacggaactgtaatcactggcggcataggtaccagaaatatcccactcacccgctgaactcaggtgctgatagttaccgctcacctgggctccattgtccggacgatcggattgcagtccggcagacatgccccagctattacgttcatccagcgtatcgttccacgacatgcggtgtatggtgctgtggctactgttttgcatgtcatagccaacccgaccaccgttaccgaaggggagcgaaatcgacagataaatctggttgtcgcgatctttatcttcgtagtgggtcgtattgaatgacgtcgaaatcgagatatctctccagtcaccaatatcaacattaaaacctgctgtgatgttggcggtcgtggaggcgtctgcattccaccaggtttgatgtagcaggttggcgtaaagattgaggtttagtggggtaatcggttggcccacggataagctgatcgtctgtttttcgtcctgcgcatcgctgtcgttgtatttgtgatccagatagttggcgtagctgtgaaaatgacgatctgagaagcgataagcggcgagcgaaatcgtgctgttggtggcatccacttgtttgctgtaattaaaacggtagcttaagccccgctcgtcctgctgagtatcaaaatggctactggcccaggtgacatcaaaggacagtgcgccaagccacagcatattttgcccgatacccattgcggcagaatggtagtcatcatcagaaatcagcaggccgccgtacagcgaggtgtttgagagcatcccccaggaaacttcattgctaaaaaaggtttcattttcagtttgatgtgacatggaaggccgtggctgacccgcggccaatttatagcgaacctgtccctggcgagtcaggaagggcgtcgatgctgccgaaacctggaaattgttcacccgaccatcttcttccgtcactttgacatccagcgtgccctgaacagactgattgaggtcatcaataataaacgggcctggcgggacttttttctggtaaatgacgcggcctgattgactgatcgtcaccgtggcattggtctgtgcaataccgctaatttgtggggcgtagccacgcagctcccacggtaacattcgatcgtcactcgccagtgccgcgccggtataagaaaaaccatcgaaaatattggaactgaaatcggtttcgccgagggttaacttagagcctaattgcggtaatggacgaaaaagataggtgcgcgatattccgcctgactggtcatggttatcttcgctatcggtcttattaagctggtaatcactgcgtaagcgccatgccccggcgttaattccggcggtaccgtaggcattcaggttagtgctgctgctgccgtcctgtgggcggtagctgctggcaaacaagttgtaatccatcaggacaccggcaacaccttctttccatgtagaggggggagcccagttttctgagtgccacgccagccaggcttgcggaatactaatattcagttgctgattggcttgatcgaaattgaagagcatttcaggtcgggaactgaaatcaatacaccgatctatctgtggcaaggactgacggatatctggttttaaaccaaatttatcgaccagtgaatcattgatgcatggaatggttttgtcaccctttttttgccagttaattttttgcccattactgattttgttgttattcaccgcaacgctaacaaaatattcaccgggagcaatgactcctttttcctttaataatgaaatatcaatgcggtcgcgcattgatttatcgagaacattcagattgaattcgaccgccattgcgcaaggcatcgccatgaccaggcaggatacaaaagagagtcgataaatattcacggtgtccatacctgataaatattttatgaaaggcggcgatgatgccgccaaaataatacttatttataatccagcacgtaggttgcgttagcggttacttcacctgccgtgacatcgactgcattatcaatttgttccatccaggcgaaaaagttcagcgtctgttctgatgagcttgcatccaggtcaagatctggcgcggctgaacctaatacgatgttaccgtcatttttgtccatcagtcgtacaccgaccccagttgcttcgcctgcactggtgttgctcaacaaaggcgtagcaccagttgtcttagccgtgctatcgaaggttacgccaactttggataccggcattccgctaccgttgtcagaagcaggcagatcacagttgatcaagcgaatgtcgacggccactttattgctatgatgctcccggtttatatgggttgtcgtgacttgtccaagatctatgtttttatcaatatcttctggatgaatttcacaaggtgcttcaataacctcccccttaaagtgaatttcgccagaaccttcatcagcagcataaacaggtgcagtgaacagcagagatacggccagtgcggccaatgttttttgtcctttaaacataacagagtcctttaaggatatagaataggggtatagctacgccagaatatcgtatttgattattgctagtttttagttttgcttaaaaatattgttagttttattaaatgcaaaactaaagtattggtatcatgaatttgttgtatgatgaataaaatataggggggtatagatagacgtcattttcatagggttataaatgcgactaccatgaagtttttaattgaaagtattgggttgctgataatttgagctgttctattctttttaaatatctatataggtctgttaatggattttatttttacaattttttgtgtttaggcatataaaaatcaacccgccatatgaacggcgggttaaaatatttacaacttagcaatcaaccattaacgcttgatatcgcttttaaagtcgcgtttttcatatcctgtatacagctgacgcggacgggcaatcttcataccgtcactgtgcatttcgctccagtgggcgatccagccaacggtacgtgccattgcgaaaatgacggtgaacatggaagacggaatacccatcgctttcaggatgataccagagtagaaatcgacgttcgggtacagtttcttctcgataaagtacgggtcgttcagcgcgatgttttccagctccatagccacttccagcaggtcatccttcgtgcccagctctttcagcacttcatggcaggtttcacgcattacggtggcgcgcgggtcgtaatttttgtacacgcggtgaccgaagcccatcaggcggaaagaatcatttttgtctttcgcacgacgaacaaattccggaatgtgtttaacggagctgatttcttccagcattttcagcgccgcttcgttagcaccgccgtgcgcaggtccccacagtgaagcaatacctgctgcgatacaggcaaacgggttcgcacccgaagagccagcggtacgcacggtggaggtagaggcgttctgttcatggtcagcgtgcaggatcagaatacggtccatagcacgttccagaatcggattaacttcatacggttcgcacggcgtggagaacatcatattcaggaagttaccggcgtaggagagatcgttgcgcgggtaaacaaatggctgaccaatggaatacttgtaacacatcgcggccatggtcggcattttcgacagcaggcggaacgcggcaatttcacggtgacgaggattgttaacatccagcgagtcgtgatagaacgccgccagcgcgccggtaataccacacatgactgccattggatgcgagtcgcgacggaaagcatggaacagacgggtaatctgctcgtggatcatggtatgacgggtcaccgtagttttaaattcgtcatactgttcctgagtcggtttttcaccattcagcaggatgtaacaaacttccaggtagttagaatcggtcgccagctgatcgatcgggaaaccgcggtgcagcaaaataccttcatcaccatcaataaaagtaattttagattcgcaggatgcggttgaagtgaagcctgggtcaaaggtgaacacaccttttgaaccgagagtacggatatcaataacatcttgacccagcgtgcctttcagcacatccagttcaacagctgtatccccgttgagggtgagttttgcttttgtatcagccatttaaggtctccttagcgccttattgcgtaagactgccggaacttaaatttgccttcgcacatcaacctggctttacccgttttttatttggctcgccgctctgtgaaagaggggaaaacctgggtacagagctctgggcgcttgcaggtaaaggatccattgatgacgaataaatggcgaatcaagtacttagcaatccgaattattaaacttgtctaccactaataactgtcccgaatgaattggtcaatacttccacactgttacataagttaatcttaggtgaaataccgacttcataacttttacgcattatatgcttttcctggtaatgtttgtaacaactttgttgaatgattgtcaaattagatgattaaaaattaaataaatgttgttatcgtgacctggatcactgttcaggataaaacccgacaaactatatgtaggttaattgtaatgattttgtgaacagcctatactgccgccaggtctccggaacaccctgcaatcccgagccacccagcgttgtaacgtgtcgttttcgcatctggaagcagtgttttgcatgacgcgcagttatagaaaggacgctgtctgacccgcaagcagaccggaggaaggaaatcccgacgtctccaggtaacagaaagttaacctctgtgcccgtagtccccagggaataataagaacagcatgtgggcgttattcatgataagaaatgtgaaaaaacaaagacctgttaatctggacctacagaccatccggttccccatcacggcgatagcgtccattctccatcgcgtttccggtgtgatcacctttgttgcagtgggcatcctgctgtggcttctgggtaccagcctctcttcccctgaaggtttcgagcaagcttccgcgattatgggcagcttcttcgtcaaatttatcatgtggggcatccttaccgctctggcgtatcacgtcgtcgtaggtattcgccacatgatgatggattttggctatctggaagaaacattcgaagcgggtaaacgctccgccaaaatctcctttgttattactgtcgtgctttcacttctcgcaggagtcctcgtatggtaagcaacgcctccgcattaggacgcaatggcgtacatgatttcatcctcgttcgcgctaccgctatcgtcctgacgctctacatcatttatatggtcggttttttcgctaccagtggcgagctgacatatgaagtctggatcggtttcttcgcctctgcgttcaccaaagtgttcaccctgctggcgctgttttctatcttgatccatgcctggatcggcatgtggcaggtgttgaccgactacgttaaaccgctggctttgcgcctgatgctgcaactggtgattgtcgttgcactggtggtttacgtgatttatggattcgttgtggtgtggggtgtgtgatgaaattgccagtcagagaatttgatgcagttgtgattggtgccggtggcgcaggtatgcgcgcggcgctgcaaatttcccagagcggccagacctgtgcgctgctctctaaagtcttcccgacccgttcccataccgtttctgcgcaaggcggcattaccgttgcgctgggtaatacccatgaagataactgggaatggcatatgtacgacaccgtgaaagggtcggactatatcggtgaccaggacgcgattgaatatatgtgtaaaaccgggccggaagcgattctggaactcgaacacatgggcctgccgttctcgcgtctcgatgatggtcgtatctatcaacgtccgtttggcggtcagtcgaaaaacttcggcggcgagcaggcggcacgcactgcggcagcagctgaccgtaccggtcacgcactgttgcacacgctttatcagcagaacctgaaaaaccacaccaccattttctccgagtggtatgcgctggatctggtgaaaaaccaggatggcgcggtggtgggttgtaccgcactgtgcatcgaaaccggtgaagtggtttatttcaaagcccgcgctaccgtgctggcgactggcggagcagggcgtatttatcagtccaccaccaacgcccacattaacaccggcgacggtgtcggcatggctatccgtgccggcgtaccggtgcaggatatggaaatgtggcagttccacccgaccggcattgccggtgcgggcgtactggtcaccgaaggttgccgtggtgaaggcggttatctgctgaacaaacatggcgaacgttttatggagcgttatgcgccgaacgccaaagacctggcgggccgtgacgtggttgcgcgttccatcatgatcgaaatccgtgaaggtcgcggctgtgatggtccgtgggggccacacgcgaaactgaaactcgatcacctgggtaaagaagttctcgaatcccgtctgccgggtatcctggagctttcccgtaccttcgctcacgtcgatccggtgaaagagccgattccggttatcccaacctgtcactacatgatgggcggtattccgaccaaagttaccggtcaggcgctgactgtgaatgagaaaggcgaagatgtggttgttccgggactgtttgccgttggtgaaatcgcttgtgtatcggtacacggcgctaaccgtctgggcggcaactcgctgctggacctggtggtctttggtcgcgcggcaggtctgcatctgcaagagtctatcgccgagcagggcgcactgcgcgatgccagcgagtctgatgttgaagcgtctctggatcgcctgaaccgctggaacaataatcgtaacggtgaagatccggtggcgatccgtaaagcgctgcaagaatgtatgcagcataacttctcggtcttccgtgaaggtgatgcgatggcgaaagggcttgagcagttgaaagtgatccgcgagcgtctgaaaaatgcccgtctggatgacacttccagcgagttcaacacccagcgcgttgagtgcctggaactggataacctgatggaaacggcgtatgcaacggctgtttctgccaacttccgtaccgaaagccgtggcgcgcatagccgcttcgacttcccggatcgtgatgatgaaaactggctgtgccactccctgtatctgccagagtcggaatccatgacgcgccgaagcgtcaacatggaaccgaaactgcgcccggcattcccgccgaagattcgtacttactaatgcggagacaggaaaatgagactcgagttttcaatttatcgctataacccggatgttgatgatgctccgcgtatgcaggattacaccctggaagcggatgaaggtcgcgacatgatgctgctggatgcgcttatccagctaaaagagaaagatcccagcctgtcgttccgccgctcctgccgtgaaggtgtgtgcggttccgacggtctgaacatgaacggcaagaatggtctggcctgtattaccccgatttcggcactcaaccagccgggcaagaagattgtgattcgcccgctgccaggtttaccggtgatccgcgatttggtggtagacatgggacaattctatgcgcaatatgagaaaattaagccttacctgttgaataatggacaaaatccgccagctcgcgagcatttacagatgccagagcagcgcgaaaaactcgacgggctgtatgaatgtattctctgcgcatgttgttcaacctcttgtccgtctttctggtggaatcccgataagtttatcggcccggcaggcttgttagcggcatatcgtttcctgattgatagccgtgataccgagactgacagccgcctcgacggtttgagtgatgcattcagcgtattccgctgtcacagcatcatgaactgcgtcagtgtatgtccgaaggggctgaacccgacgcgcgccatcggccatatcaagtcgatgttgttgcaacgtaatgcgtaaaccgtaggcctgataagacgcgcaagcgtcgcatcaggcaaccagtgccggatgcggcgtgaacgccttatccggcctacaagtcattacccgtaggcctgataagcgcagcgcatcaggcgtaacaaagaaatgcaggaaatctttaaaaactgcccctgacactaagacagtttttaaaggttccttcgcgagccactacgtagacaagagctcgcaagtgaaccccggcacgcacatcactgtgcgtggtagtatccacggcgaagtaagcataaaaaagatgcttaagggatcacgatgcagaacagcgctttgaaagcctggttggactcttcttacctctctggcgcaaaccagagctggatagaacagctctatgaagacttcttaaccgatcctgactcggttgacgctaactggcgttcgacgttccagcagttacctggtacgggagtcaaaccggatcaattccactctcaaacgcgtgaatatttccgccgcctggcgaaagacgcttcacgttactcttcaacgatctccgaccctgacaccaatgtgaagcaggttaaagtcctgcagctcattaacgcataccgcttccgtggtcaccagcatgcgaatctcgatccgctgggactgtggcagcaagataaagtggccgatctggatccgtctttccacgatctgaccgaagcagatttccaggagaccttcaacgtcggttcatttgccagcggcaaagaaaccatgaaactcggcgagctgctggaagccctcaagcaaacctactgcggcccgattggtgccgagtatatgcacattaccagcaccgaagaaaaacgctggatccaacagcgtatcgagtctggtcgcgcgactttcaatagcgaagagaaaaaacgcttcttaagcgaactgaccgccgctgaaggtcttgaacgttacctcggcgcaaaattccctggcgcaaaacgcttctcgctggaaggcggtgacgcgttaatcccgatgcttaaagagatgatccgccacgctggcaacagcggcacccgcgaagtggttctcgggatggcgcaccgtggtcgtctgaacgtgctggtgaacgtgctgggtaaaaaaccgcaagacttgttcgacgagttcgccggtaaacataaagaacacctcggcacgggtgacgtgaaataccacatgggcttctcgtctgacttccagaccgatggcggcctggtgcacctggcgctggcgtttaacccgtctcaccttgagattgtaagcccggtagttatcggttctgttcgtgcccgtctggacagacttgatgagccgagcagcaacaaagtgctgccaatcaccatccacggtgacgccgcagtgaccgggcagggcgtggttcaggaaaccctgaacatgtcgaaagcgcgtggttatgaagttggcggtacggtacgtatcgttatcaacaaccaggttggtttcaccacctctaatccgctggatgcccgttctacgccgtactgtactgatatcggtaagatggttcaggccccgattttccacgttaacgcggacgatccggaagccgttgcctttgtgacccgtctggcgctcgatttccgtaacacctttaaacgtgatgtcttcatcgacctggtgtgctaccgccgtcacggccacaacgaagccgacgagccgagcgcaacccagccgctgatgtatcagaaaatcaaaaaacatccgacaccgcgcaaaatctacgctgacaagctggagcaggaaaaagtggcgacgctggaagatgccaccgagatggttaacctgtaccgcgatgcgctggatgctggcgattgcgtagtggcagagtggcgtccgatgaacatgcactctttcacctggtcgccgtacctcaaccacgaatgggacgaagagtacccgaacaaagttgagatgaagcgcctgcaggagctggcgaaacgcatcagcacggtgccggaagcagttgaaatgcagtctcgcgttgccaagatttatggcgatcgccaggcgatggctgccggtgagaaactgttcgactggggcggtgcggaaaacctcgcttacgccacgctggttgatgaaggcattccggttcgcctgtcgggtgaagactccggtcgcggtaccttcttccaccgccacgcggtgatccacaaccagtctaacggttccacttacacgccgctgcaacatatccataacgggcagggcgcgttccgtgtctgggactccgtactgtctgaagaagcagtgctggcgtttgaatatggttatgccaccgcagaaccacgcactctgaccatctgggaagcgcagttcggtgacttcgccaacggtgcgcaggtggttatcgaccagttcatctcctctggcgaacagaaatggggccggatgtgtggtctggtgatgttgctgccgcacggttacgaagggcaggggccggagcactcctccgcgcgtctggaacgttatctgcaactttgtgctgagcaaaacatgcaggtttgcgtaccgtctaccccggcacaggtttaccacatgctgcgtcgtcaggcgctgcgcgggatgcgtcgtccgctggtcgtgatgtcgccgaaatccctgctgcgtcatccgctggcggtttccagcctcgaagaactggcgaacggcaccttcctgccagccatcggtgaaatcgacgagcttgatccgaagggcgtgaagcgcgtagtgatgtgttctggtaaggtttattacgacctgctggaacagcgtcgtaagaacaatcaacacgatgtcgccattgtgcgtatcgagcaactctacccgttcccgcataaagcgatgcaggaagtgttgcagcagtttgctcacgtcaaggattttgtctggtgccaggaagagccgctcaaccagggcgcatggtactgcagccagcatcatttccgtgaagtgattccgtttggggcttctctgcgttatgcaggccgcccggcctccgcctctccggcggtagggtatatgtccgttcaccagaaacagcaacaagatctggttaatgacgcgctgaacgtcgaataaataaaggatacacaatgagtagcgtagatattctggtccctgacctgcctgaatccgtagccgatgccaccgtcgcaacctggcataaaaaacccggcgacgcagtcgtacgtgatgaagtgctggtagaaatcgaaactgacaaagtggtactggaagtaccggcatcagcagacggcattctggatgcggttctggaagatgaaggtacaacggtaacgtctcgtcagatccttggtcgcctgcgtgaaggcaacagcgccggtaaagaaaccagcgccaaatctgaagagaaagcgtccactccggcgcaacgccagcaggcgtctctggaagagcaaaacaacgatgcgttaagcccggcgatccgtcgcctgctggctgaacacaatctcgacgccagcgccattaaaggcaccggtgtgggtggtcgtctgactcgtgaagatgtggaaaaacatctggcgaaagccccggcgaaagagtctgctccggcagcggctgctccggcggcgcaaccggctctggctgcacgtagtgaaaaacgtgtcccgatgactcgcctgcgtaagcgtgtggcagagcgtctgctggaagcgaaaaactccaccgccatgctgaccacgttcaacgaagtcaacatgaagccgattatggatctgcgtaagcagtacggtgaagcgtttgaaaaacgccacggcatccgtctgggctttatgtccttctacgtgaaagcggtggttgaagccctgaaacgttacccggaagtgaacgcttctatcgacggcgatgacgtggtttaccacaactatttcgacgtcagcatggcggtttctacgccgcgcggcctggtgacgccggttctgcgtgatgtcgataccctcggcatggcagacatcgagaagaaaatcaaagagctggcagtcaaaggccgtgacggcaagctgaccgttgaagatctgaccggtggtaacttcaccatcaccaacggtggtgtgttcggttccctgatgtctacgccgatcatcaacccgccgcagagcgcaattctgggtatgcacgctatcaaagatcgtccgatggcggtgaatggtcaggttgagatcctgccgatgatgtacctggcgctgtcctacgatcaccgtctgatcgatggtcgcgaatccgtgggcttcctggtaacgatcaaagagttgctggaagatccgacgcgtctgctgctggacgtgtagtagtttaagtttcacctgcactgtagaccggataaggcattatcgccttctccggcaattgaagcctgatgcgacgctgacgcgtcttatcaggcctacgggaccaccaatgtaggtcggataaggcgctagcgccgcatccgacaagcgatgcctgatgtgacggttaacgtgtcttatcaggcctacggggaccaccaatgtaggtcggataaggcgcaagcgccgcatccgacaagcgatgcctgatgtgacgtttaacgtgtcttatcaggcctacgggtgaccgacaatgcccggaagcgatacgaaatattcggtctacggtttaaaagataacgattactgaaggatggacagaacacatgaacttacatgaatatcaggcaaaacaactttttgcccgctatggcttaccagcaccggtgggttatgcctgtactactccgcgcgaagcagaagaagccgcttcaaaaatcggtgccggtccgtgggtagtgaaatgtcaggttcacgctggtggccgcggtaaagcgggcggtgtgaaagttgtaaacagcaaagaagacatccgtgcttttgcagaaaactggctgggcaagcgtctggtaacgtatcaaacagatgccaatggccaaccggttaaccagattctggttgaagcagcgaccgatatcgctaaagagctgtatctcggtgccgttgttgaccgtagttcccgtcgtgtggtctttatggcctccaccgaaggcggcgtggaaatcgaaaaagtggcggaagaaactccgcacctgatccataaagttgcgcttgatccgctgactggcccgatgccgtatcagggacgcgagctggcgttcaaactgggtctggaaggtaaactggttcagcagttcaccaaaatcttcatgggcctggcgaccattttcctggagcgcgacctggcgttgatcgaaatcaacccgctggtcatcaccaaacagggcgatctgatttgcctcgacggcaaactgggcgctgacggcaacgcactgttccgccagcctgatctgcgcgaaatgcgtgaccagtcgcaggaagatccgcgtgaagcacaggctgcacagtgggaactgaactacgttgcgctggacggtaacatcggttgtatggttaacggcgcaggtctggcgatgggtacgatggacatcgttaaactgcacggcggcgaaccggctaacttccttgacgttggcggcggcgcaaccaaagaacgtgtaaccgaagcgttcaaaatcatcctctctgacgacaaagtgaaagccgttctggttaacatcttcggcggtatcgttcgttgcgacctgatcgctgacggtatcatcggcgcggtagcagaagtgggtgttaacgtaccggtcgtggtacgtctggaaggtaacaacgccgaactcggcgcgaagaaactggctgacagcggcctgaatattattgcagcaaaaggtctgacggatgcagctcagcaggttgttgccgcagtggaggggaaataatgtccattttaatcgataaaaacaccaaggttatctgccagggctttaccggtagccaggggactttccactcagaacaggccattgcatacggcactaaaatggttggcggcgtaaccccaggtaaaggcggcaccacccacctcggcctgccggtgttcaacaccgtgcgtgaagccgttgctgccactggcgctaccgcttctgttatctacgtaccagcaccgttctgcaaagactccattctggaagccatcgacgcaggcatcaaactgattatcaccatcactgaaggcatcccgacgctggatatgctgaccgtgaaagtgaagctggatgaagcaggcgttcgtatgatcggcccgaactgcccaggcgttatcactccgggtgaatgcaaaatcggtatccagcctggtcacattcacaaaccgggtaaagtgggtatcgtttcccgttccggtacactgacctatgaagcggttaaacagaccacggattacggtttcggtcagtcgacctgtgtcggtatcggcggtgacccgatcccgggctctaactttatcgacattctcgaaatgttcgaaaaagatccgcagaccgaagcgatcgtgatgatcggtgagatcggcggtagcgctgaagaagaagcagctgcgtacatcaaagagcacgttaccaagccagttgtgggttacatcgctggtgtgactgcgccgaaaggcaaacgtatgggccacgcgggtgccatcattgccggtgggaaagggactgcggatgagaaattcgctgctctggaagccgcaggcgtgaaaaccgttcgcagcctggcggatatcggtgaagcactgaaaactgttctgaaataaatatctgtaataagaaatagccctcgccgcttccctctacaggaatggcgaagggctgtcggtttcgacatggttggccatcgtatgatggccttttttgtgcttatcgcgatgattttcgctgcgctatcagggtaaatttatagtcatcggtattaaaagcgttgcggctatattcaaacacccgaccatcaactaaatatccacgcgatactttttcaagaatcggctttgtctggctgatattaagcagacggctcatctcttcggttggcatcagaggaatgatttcctgttcgctacgatcgataaccattttcttcacttcttcgataaagtgatatttcgaattttccatgacctgccaggtgagatccgggaacaacgcaagcggcatccaggtttcttccagcgccattggcttttgcttgcgatagcgcacgcgcttcacatgccacacacgatcctgcggggtgatttgtagctgttgctgaagaaaatcgtcagccggaatcacttcgaatatcagaacttcactgtgtgtatcgacgtgacggtccgacagtttttcatcaaaactggttaactgaaaaatatcgtaattgacccgctcttctttgacgtaagtcccgctgccctgaatgctttcgaggatctgctgctcgactagctggcgcaaagcctgacgcaccgtaacccggctgacgccaaactctgtttgtagcgctgattcagtgggtaacgcatcgccaggtttaagctcgccacgcgcaatttgttcacgaatgcgatcggcaatctgccggtataagggcttgtgtcccatttttagtatctcattaatacgaatttaaccattatgcccgataaattcatcctgtaaataatacaaatacaatacaaataatttcaatcaagtgaaattgatcacataatggtattgttttatcgggcacactggcgcgactataaaaacgatcaagtgaggatcatgatgaatctgacgactctgacccaccgcgatgcgttgtgtctgaatgcgcgctttaccagccgtgaagaggccatccacgcgttgactcaacgtcttgctgctctggggaaaatttccagtactgagcaatttctggaagaagtgtatcgccgtgaaagccttggcccgaccgccttaggtgaagggttggctgtgccgcatggcaaaactgctgcggtaaaagaagcggcgtttgcggtcgccacactcagcgagccgcttcagtgggaaggcgttgatggcccggaagcagttgatttagtggtgctgctggcgattccccccaatgaagcgggtactacgcatatgcaactgctgacagcgctgaccacgcgccttgcggatgatgagattcgggcgcgtatacagtcggcgacgacgcctgatgagttgctctcggcgctggatgacaagagaggcacgcaaccttctgcctctttttccaacgcgccaactatcgtctgcgtaacggcctgtccggcgggtattgctcacacctatatggctgcggaatatctggaaaaagccggacgcaaactcggcgtaaatgtttacgttgaaaaacaaggcgctaacggcattgaagggcgtttaacggcggatcaactcaatagtgcaaccgcctgtatttttgcggctgaagtcgccatcaaggagagtgagcgttttaatggcattcccgcgctttcagtgcctgttgccgagccgattcgccatgcagaagcgttgatccaacaagcgcttaccctcaagcgtagcgatgagacgcgtaccgtacagcaagatacgcaaccggtgaaaagtgtcaaaacggagctgaaacaggcactgttgagcggaatctcttttgccgtaccgttgattgtcgcggggggcacggtgctggcggtcgcggtattactgtcgcaaatcttcgggctacaagatctgtttaatgaagaaaactcctggctgtggatgtaccgcaagctgggcggcgggctgctcggaattttgatggtaccggtgctcgcggcctataccgcctattctctggcagataaaccggcgttagcgccaggctttgcggctggacttgccgccaacatgatcggctccgggtttctcggcgcggtcgttggcggattgatagccggttacttgatgcgctgggtgaaaaatcacttgcgtcttagcagtaaattcaatggattcctgactttttatctctacccggtgctcggtacgttgggagcgggcagtctgatgctgtttgtggtgggggaacctgtcgcctggatcaataactcgcttaccgcctggctgaacggtctgtcaggaagtaacgcgctgttgctgggtgccattctcggttttatgtgttcctttgaccttggagggccagtgaataaagccgcttatgcattctgcctgggcgcaatggcgaacggcgtttacggcccgtatgccattttcgcctccgtcaaaatggtttcggcatttaccgtaaccgcttccacgatgctcgcaccgcgcctgtttaaagagtttgaaattgagaccgggaaatccacctggctgttagggctggcaggtattaccgaaggggcgatcccgatggcgattgaagatccgctgcgggttattggttcgtttgtgctgggctctatggtaacgggcgctattgtcggtgcgatgaatatcggcctttcgacacccggtgccggcattttctcgctctttttacttcatgataatggcgcgggcggtgttatggcggcaattggctggtttggcgcggcattggtgggggctgcaatctcgactgcaattctcctgatgtggcggcgtcacgcggttaagcatggcaactatctgactgatggcgtaatgccataaacaaaaaggaaacgacgatgaaagcagtatctcgcgttcacatcaccccgcatatgcactgggatcgagagtggtatttcaccaccgaagagtcacgtattctgctggtcaataatatggaagagatcctgtgccgactggaacaggacaacgaatacaaatattacgtactcgacgggcaaacggcgatcctcgaagattatttcgcggtgaaaccggaaaacaaagaccgtgtgaagaaacaggtagaagccggcaagttgattatcggcccctggtatacccagaccgataccacgattgtttctgcggaatccatcgtccgtaatctgatgtacggaatgcgtgactgcctcgcgtttggcgagccgatgaaaataggttatttaccagattcctttggcatgtccgggcaactgccgcatatctacaatggatttggcattacccgcaccatgttctggcgcggatgttcggagcgccacggtactgataaaaccgagtttttgtggcaaagcagtgacggtagcgaagtgacggcgcaggtgctgccgctgggctacgccatcggtaagtacttacctgccgacgaaaacggattacgtaaacgcctcgacagttattttgacgtgctggaaaaagcgtctgtaaccaaagagattttgctgccgaatgggcatgaccagatgccattgcagcaaaatatcttcgaagtgatggataagctacgtgagatctaccctcaacgtaagtttgtgatgagccgctttgaagaggtatttgagaagatcgaagcgcagcgagataatctggcaaccctgaaaggggaatttattgatggcaaatatatgcgcgtgcatcgcaccatcggttctacgcgtatggatatcaaaattgcccacgcgcgtattgaaaataagattgttaatctgctggaaccgctggcaacactggcctggacgttgggttttgaataccaccacggcttgctggagaaaatgtggaaagagatcttaaaaaatcatgcccacgacagtatcggctgctgctgtagtgacaaagttcatcgcgaaatcgtcgcccgcttcgaactggctgaagacatggcggataatctgattcgtttctacatgcgcaaaattgccgacaacatgccgcagagcgacgccgacaaactcgtcctgtttaacctgatgccctggccgcgtgaagaagttatcaacaccactgtgcggctgcgcgccagccagtttaatttgcgggacgatcgcggtcagcctgtaccgtattttattcgccatgcccgtgagatcgatccaggcctaatcgatcggcaaatagttcattacggtaattacgatccctttatggagtttgatatacagatcaaccagattgtcccttctatgggctatcgcacgctttatatcgaagcgaatcagcctggcaacgtaattgcggcaaaaagtgacgctgaagggatactggaaaatgctttctggcaaattgcgctcaatgaggatggttctctgcaactggtagataaagacagcggtgtgcgctatgaccgggtattgcaaattgaagaaagctctgatgatggtgatgaatatgactattcacccgcaaaagaagagtgggtaattaccgcagcgaacgcgaaaccgcaatgcgatattattcatgaagcctggcagagcagggctgttatccgctatgacatggcagtgccgctcaatttgtcagaacgcagcgcccggcaatccactggcagagtaggggtggtgttggttgtcactcttagtcataacagcaggcgtattgatgtggatatcaatcttgataaccaggctgacgatcatcgccttcgtgtcctggtccctacaccttttaacaccgacagtgttctggcagatacgcagtttggttcgctaacgcgccccgtgaacgacagtgcaatgaacaactggcagcaagaaggctggaaagaagcgccggttccggtatggaatatgctcaactatgttgccttacaggaagggcgtaacggcatggctgtctttagcgaagggttacgtgaatttgaagtcatcggtgaagagaagaaaacctttgccattacgttgctgcgtggcgtgggcttactgggcaaagaagatctgcttttaaggcctgggcggccttcgggaattaaaatgccagtcccggactcacaactacgtggtctgctttcttgtcgcctaagtttattgagttataccggtacgccaaccgccgctggtgtagctcagcaggcgcgagcatggctgactccagtacagtgttacaacaaaatcccatgggatgtgatgaagctcaacaaagccggattcaacgtgccggaaagttatagtttgttgaaaatgcccccagtgggatgcctgataagcgcacttaagaaagctgaagaccgacaagaagtgattttacggctgtttaatccggctgaatcagcaacctgtgatgcgactgttgctttcagtcgcgaggtgatttcttgctcagaaacgatgatggatgaacacattaccaccgaggaaaatcaaggttcaaatctatcggggccttttttacccggccagtcacggacgttcagttaccggcttgcctgaatagcaatcaaaccgaagccacatatgcgcggccagattgttgacaaagggcgctttgttcatgccggatacggcatgaacgctttattcggtctacaaaagcaggcaaattcaatatattgcagagatgatgtagacactggcaagcgtagcgcatcaggtaattttgcgtttatcttcactctcaagccacgtatatgtggctttatttttaacaaaataataaccctgggtgagttaattataatataattataagttaactaaatattaatattggcggggtggatttatgcctttattagtaatcctgaaactctgcgtcgtattagccagtgaccaaaaaaagaattaaggtcaaccgtgctgtttttgcttcgtctctttttatctttaattgccaaccgaaactaatttcagccttataactcacacattttaaacataaatgtcactaaagttaccttattgaaacatgattaacataatttgtaggaattgatatttatcaatgtataagtcttggaaatgggcatcaaaaagagataaattgttctcgatcaaattggctgaaaggcggtaatttagctataaattgatcaccgtcgaaaaatgcaaatttgcttcaacaaaaacctgtttattgtaaggattttgcggcgtaatatatacgtgggatcaatttgagtttttattaacatgtttgcaacctttctttacgccgtttttgtgtgcattcacatggtatgatgaaagtgttcaaacaaatttctattggggcatgcgtgtgaccctttctaacggggttcactctcggagtcttcatgcgatgagcaaggagtcatgatgttagatatagtcgaactgtcgcgcttacagtttgccttgaccgcgatgtaccacttcctttttgtgccactgacgctcggtatggcgttcctgctggccattatggaaacggtctacgtcctctccggcaaacagatttataaagatatgaccaagttctggggcaagttgtttggtatcaacttcgctctgggtgtggctaccggtctgaccatggagttccagttcgggactaactggtcttactattcccactatgtaggggatatcttcggtgcgccgctggcaatcgaaggtctgatggccttcttcctcgaatccacctttgtaggtctgttcttcttcggttgggatcgtctgggtaaagttcagcatatgtgtgtcacctggctggtggcgctcggttcaaacctgtccgcactgtggattctggttgcgaacggctggatgcaaaacccaatcgcgtccgatttcaactttgaaactatgcgtatggagatggtgagcttctccgagctggtgcttaacccggttgctcaggtgaaattcgttcacactgtagcgtctggttatgtgactggcgcgatgttcatcctcggtatcagcgcatggtatatgctgaaaggtcgtgacttcgccttcgctaaacgctcctttgctatcgctgccagcttcggtatggctgctgttctgtctgttattgttctgggtgatgaatccggctacgaaatgggcgacgtgcagaaaaccaaactggctgctattgaagccgagtgggaaacgcaacctgcgcctgctgcctttactctgttcggcattcctgatcaggaagaggagacgaacaaatttgcgattcagatcccttacgcactgggcatcattgcaacgcgttccgtggataccccggttatcggcctgaaagagctgatggtgcagcatgaagaacgcattcgtaacgggatgaaggcgtactctctgctcgaacaactgcgttctggttctaccgaccaggcggttcgtgaccagttcaatagcatgaagaaagacctcggttacggtctgctgctgaaacgctatacgccaaacgtggctgatgcgactgaagcgcagattcaacaggcaaccaaagactccatcccgcgtgtagcgccgctgtactttgcgttccgtatcatggtggcgtgtggcttcctgcttctggcaatcatcgcgctctctttctggagtgtcatccgcaaccgcattggcgagaaaaaatggcttctgcgcgccgcgctgtacggtattccgctgccgtggattgctgtagaagcgggctggttcgtggctgaatatggccgccaaccgtgggctatcggtgaagtgctgccgacagctgtggcgaactcgtcactgaccgcaggcgatctcatcttctcaatggtgctgatttgcggcctgtataccctgttcctggtggcagaattgttcttaatgttcaagtttgcacgcctcggcccaagcagcctgaaaaccggtcgctatcactttgagcagtcttccacgactactcagccggcacgctaagacaggagtcgtcaaatgatcgattatgaagtattgcgttttatctggtggctgctggttggcgttctgctgattggttttgcagtcactgacggtttcgacatgggggtgggcatgctcacccgtttcctcggtcgtaacgacaccgagcgtcgaattatgattaactccattgcaccacactgggacggtaaccaggtttggctgatcaccgcgggcggcgcactctttgctgcctggccgatggtctatgccgctgcgttctccggcttctatgtggcgatgatcctcgtgctggcgtctttgttcttccgtccggtcggttttgactaccgctccaagattgaagaaacccgctggcgtaacatgtgggactggggcatcttcattggtagcttcgttccgccgctggtaattggtgtagcgttcggtaacctgttgcagggcgtaccgttcaacgttgatgaatatctgcgtctgtactacaccggtaacttcttccagttgcttaacccgttcggcctgctggcaggcgtggtgagcgtagggatgatcattactcagggcgcaacctatctgcaaatgcgtaccgtgggcgaactgcacctgcgtacccgtgcaacggctcaggtggctgcgctggtgacactggtctgtttcgcactggctggcgtatgggtgatgtacggtatcgatggttatgtcgtgaaatcgacaatggaccattacgcagcctctaacccactgaataaagaagtggttcgtgaagctggcgcatggctggttaacttcaacaacacgccaattctgtgggctattccggcactgggtgtggttctgccgctgctgaccatcctgactgcacgtatggataaagccgcgtgggcgtttgtgttctcctccctgacgctggcctgcatcatcctgacagccggtatcgcaatgttcccgtttgtgatgccgtccagcaccatgatgaacgcaagtctgacaatgtgggatgcaacttccagccagctgacgcttaacgtcatgacctgggttgcggtggttctggtaccgatcattctgctctacaccgcctggtgttactggaaaatgttcggtcgtatcaccaaagaagatattgaacgtaacacccactctctgtactaagtaaggagctaaaaatgtggtatttcgcatggattctgggaacgcttcttgcctgttcgtttggggtaatcaccgcgctggcgcttgaacacgtcgaatcaggcaaagccggtcaagaagacatctgatgagtaagattatcgcgactttgtatgcggtaatggacaagcgccccctgcgggcgctttccttcgtgatggcgcttctgttagcaggatgtatgttttgggacccatctcgttttgccgcgaagaccagtgaactggaaatctggcatggtttattgctgatgtgggccgtctgtgctggtgtgattcacggcgtgggctttcgtccgcagaaggttctttggcaagggattttttgcccattgcttgccgatattgttctcattgtcgggctgattttcttcttcttttaaatcagaattctctttaaaaaattatgggccgctccaggcccataaatttttacgctcccttaacttgccctcattcccaaacctcaatcgcgcgcgtatagtagcagcgtttaaaagctctaacttttgttgcattaccgggatgtaaagtgaatacaacgctgtttcgatggccggttcgcgtctactatgaagataccgatgccggtggtgtggtgtaccacgccagttacgtcgctttttatgaaagagcacgcacagagatgctgcgtcatcatcacttcagtcagcaggcgctgatggctgaacgcgttgcctttgtggtacgtaaaatgacggtggaatattacgcacctgcgcggctcgacgatatgctcgaaatacagactgaaataacatcaatgcgtggcacctctttggttttcacgcaacgtattgtcaacgccgagaatactttgctgaatgaagcagaggttctggttgtttgcgttgacccactcaaaatgaagcctcgtgcgcttcccaagtctattgtcgcggagtttaagcagtgactgacatgaatatccttgatttgttcctgaaggctagccttctggttaaacttatcatgttgattttgattggtttttcaatcgcatcttgggccattattatccagcggacccgtattcttaacgcagcggcgcgcgaagccgaagcgtttgaagataaattctggtctggaatcgaactctctcgcctctatcaagagagccaggggaaacgggataatctgactggttcggaacaaatcttttacagcgggttcaaagagtttgtgcgcctgcatcgtgccaatagccatgcgccggaagccgtagtggaaggggcgtcgcgtgctatgcgtatctccatgaaccgtgaacttgaaaatctggaaacgcacattccgttcctcggtacggttggctccatcagcccgtatattggtctgtttggtacggtctgggggatcatgcacgcctttatcgccctcggggcggtaaaacaagcaacactgcaaatggttgcgcccggtatcgcagaagcgttgattgcgactgcaattggtctgtttgccgctatcccggcagttatggcctacaaccgcctcaaccagcgcgtaaacaaactggaactgaattacgacaactttatggaagagtttaccgcgattctgcaccgccaggcgtttaccgttagcgagagcaacaaggggtaagccatggccagagcgcgtggacgaggtcgtcgcgatctcaagtccgaaatcaacattgtaccgttgctggacgtactgctggtgctgttgctgatctttatggcgacagcgcccatcatcacccagagcgtggaggtcgatctgccagacgctactgaatcacaggcggtgagcagtaacgataatccgccagtgattgttgaagtgtctggtattggtcagtacaccgtggtggttgagaaagatcgcctggagcgtttaccaccagagcaggtggtggcggaagtgtccagccgtttcaaggccaacccgaaaacggtctttctgatcggtggcgcaaaagatgtgccttacgatgaaataattaaagcactgaacttgttacatagtgcgggtgtgaaatcggttggtttaatgacgcagcctatctaaacatctgcgtttcccttgcttgaaagagagcgggtaacaggcgaacagtttttggaaaccgagagtgtcaaaggcaaccgaacaaaacgacaagctcaagcgggcgataattatttcagcagtgctgcatgtcatcttatttgcggcgctgatctggagttcgttcgatgagaatatagaagcttcagccggaggcggcggtggttcgtccatcgacgctgtcatggttgattcaggtgcggtagttgagcagtacaaacgcatgcaaagccaggaatcaagcgcgaagcgttctgatgaacagcgcaagatgaaggaacagcaggctgctgaagaactgcgtgagaaacaagcggctgaacaggaacgcctgaagcaacttgagaaagagcggttagcggctcaggagcagaaaaagcaggctgaagaagccgcaaaacaggccgagttaaagcagaagcaagctgaagaggcggcagcgaaagcggcggcagatgctaaagcgaaggccgaagcagatgctaaagctgcggaagaagcagcgaagaaagcggctgcagacgcaaagaaaaaagcagaagcagaagccgccaaagccgcagccgaagcgcagaaaaaagccgaggcagccgctgcggcactgaagaagaaagcggaagcggcagaagcagctgcagctgaagcaagaaagaaagcggcaactgaagctgctgaaaaagccaaagcagaagctgagaagaaagcggctgctgaaaaggctgcagctgataagaaagcggcagcagagaaagctgcagccgacaaaaaagcagcagaaaaagcggctgctgaaaaggcagcagctgataagaaagcagcggcagaaaaagccgccgcagacaaaaaagcggcagcggcaaaagctgcagctgaaaaagccgctgcagcaaaagcggccgcagaggcagatgatattttcggtgagctaagctctggtaagaatgcaccgaaaacggggggaggggcgaaagggaacaatgcttcgcctgccgggagtggtaatactaaaaacaatggcgcatcaggggccgatatcaataactatgccgggcagattaaatctgctatcgaaagtaagttctatgacgcatcgtcctatgcaggcaaaacctgtacgctgcgcataaaactggcacccgatggtatgttactggatatcaaacctgaaggtggcgatcccgcactttgtcaggctgcgttggcagcagctaaacttgcgaagatcccgaaaccaccaagccaggcagtatatgaagtgttcaaaaacgcgccattggacttcaaaccgtaatcgcgatgttgactgttcggacggtcaacatcaggcaccggttgccacggggttctggtagttttgtgtattttagtttgttaacattctgctaaattatcgtgggccatcggtccagataagggagatatgatgaagcaggcattacgagtagcatttggttttctcatactgtgggcatcagttctgcatgctgaagtccgcattgtgatcgacagcggtgtagattccggtcgtcctattggtgttgttcctttccagtgggcggggcctggtgcggcacctgaagatattggcggcatcgttgctgctgacttgcgtaacagcggtaaatttaatccgttagatcgcgctcgtctgccacagcagccgggtagtgcgcaggaagtacaaccagctgcatggtccgcactgggcattgacgctgtagttgtcggtcaggtcactccgaatccggatggttcttacaatgttgcttatcaacttgttgacactggcggcgcaccgggtactgtacttgctcagaactcgtacaaagtgaacaagcagtggctgcgttatgctggtcataccgccagtgatgaagtgtttgaaaaactgaccggcattaaaggtgcgttccgtactcgtattgcctacgttgttcagaccaacggcggtcagttcccgtatgaactgcgcgtatctgactatgacggttacaaccagtttgtcgttcaccgttcaccgcagccgctgatgtctccggcgtggtcaccagacggttctaaactggcttatgtgaccttcgaaagcggtcgttccgcgctggttattcagacgctggcaaatggcgctgtacgtcaggtggcttcattcccgcgtcacaacggtgcacctgcattctcgccagacggcagcaaactggcattcgccttgtcgaaaaccggtagtctgaacctgtacgtaatggatttggcttctggtcagatccgccaggtgactgatggtcgcagtaacaataccgaaccgacctggttcccggatagccagaacctggcatttacttctgaccaggccggtcgtccgcaggtttataaagtgaatatcaacggcggtgcgccacaacgtattacctgggaaggttcgcagaaccaggatgcggatgtcagcagcgacggtaaatttatggtaatggtcagctccaatggtgggcagcagcacattgccaaacaagatctggcaacgggaggcgtacaagttctgtcgtccacgttcctggatgaaacgccaagtctggcacctaacggcactatggtaatctacagctcttctcaggggatgggatccgtgctgaatttggtttctacagatgggcgtttcaaagcgcgtcttccggcaactgatggacaggtcaaattccctgcctggtcgccgtatctgtgataataattaattgaatagtaaaggaatcattgaaatgcaactgaacaaagtgctgaaagggctgatgattgctctgcctgttatggcaattgcggcatgttcttccaacaagaacgccagcaatgacggcagcgaaggcatgctgggtgccggcactggtatggatgcgaacggcggcaacggcaacatgtcttccgaagagcaggctcgtctgcaaatgcaacagctgcagcagaacaacatcgtttacttcgatctggacaagtacgatatccgttctgacttcgctcaaatgctggatgcacatgcaaacttcctgcgtagcaacccgtcttacaaagtcaccgtagaaggtcacgcggacgaacgtggtactccggaatacaacatctccctgggtgaacgtcgtgcgaacgccgttaagatgtacctgcagggtaaaggcgtttctgcagaccagatctccatcgtttcttacggtaaagaaaaacctgcagtactgggtcatgacgaagcggcatactccaaaaaccgtcgtgcggtactggtttactaagagaattgcatgagcagtaacttcagacatcaactattgagtctgtcgttactggttggtatagcggccccctgggccgcttttgctcaggcaccaatcagtagtgtcggctcaggctcggtcgaagaccgcgtcactcaacttgagcgtatttctaatgctcacagccagcttttaacccaactccagcaacaactttctgataatcaatccgatattgattccctgcgtggtcagattcaggaaaatcagtatcaactgaatcaggtcgtggagcggcaaaagcagatcctgttgcagatcgacagcctcagcagcggtggtgcagcggcgcaatcaaccagcggcgatcaaagcggtgcggcggcatcaacgacgccgacagctgatgctggtactgcgaatgctggcgcgccggtgaaaagcggtaatgcaaacacggattacaatgcagctattgcgctggtgcaggataaatcccgccaggatgacgcaatggtggcatttcagaatttcatcaaaaattaccctgattcaacttacctgccaaacgccaattattggctgggtcagttaaactacaacaagggtaaaaaagatgatgcggcgtactattttgcttcggtagtgaaaaactatccgaagtcaccaaaggctgcagatgcgatgtttaaagtcggcgtcatcatgcaggacaaaggtgacaccgcaaaagcgaaagccgtataccagcaggttatcagtaaataccctggtactgatggcgctaaacaggcacaaaaacgtctgaacgcgatgtaatgcataacacacgaccagaagtcgcattatttctggtcgtgtcgtgcgaatcataagcagttgagtgatctacatcgaaatttttgttgcgctcaagtctgaaatcagtaatatatgccgccgttgccacgggatatcaaacaaaccgaaagcaacgaaaaagtgggtcgttagctcagttggtagagcagttgacttttaatcaattggtcgcaggttcgaatcctgcacgacccaccaatcgctaaggtggaagcggtagtaaaacgtgaaggataacgttgcatgagcaacggcccgaagggcgagacgaagtcgagtcatcctgcacgacccaccactaacatagttagttgtagtatccagcgtagtatcgggtgattagctcagctgggagagcacctcccttacaaggagggggtcggcggttcgatcccgtcatcacccaccaccgggtcgttagctcagttggtagagcagttgacttttaatcaattggtcgcaggttcgaatcctgcacgacccaccagttttaacatcgaagacagatgttaagcgtgtaggataacgttgcgtcagcaacggcccgtagggcgagcgaagcgagtcatcctgcacgacccaccactaatgacggtgggttcggtggaagtagtttgtagtatccagcgcagtatcgggtgattagctcagctgggagagcacctcccttacaaggagggggtcggcggttcgatcccgtcatcacccaccactcgggtcgttagctcagttggtagagcagttgacttttaatcaattggtcgcaggttcgaatcctgcacgacccaccagttttaacatcaaactcagatgttaagcgtgaaggataacgttgcgccagcaacggcccgtagggcgagcgaagcgagtcatcctgcacgacccaccaatcttaaagattggccccgagtaaaaatctttcaggtaacacccgtatgggtcgttagctcagttggtagagcagttgacttttaatcaattggtcgcaggttcgaatcctgcacgacccaccaatttaaaggtggttactggtagagaacgtgaaggataacgttgcgttagcaacggcccgaagggcgagacgaagtcgagtcatcctgcacgacccaccatcctgaatgattaaggcagcataatcccgcaaggggtcgttagctcagttggtagagcagttgacttttaatcaattggtcgcaggttcgaatcctgcacgacccaccaatgtaaaaaagcgccctaaaggcgcttttttgctatctgcgatactcaaagattcgaacctgcagcaggtttgagttgagcgtagcgaaacaacggagccgctcgcggcgacggcccgaagggcgagcgaagcgagtcatcctgcacgacccaccaatgtaaaaaagcgccctaaaggcgcttttttgctattcaggcatcctcaatttcactttgtaaacctgatgacatcgtcagagcttactgtgcaagcaactctatgtcggtggaattaggcgtaaaatgacgcatcctgcacattaggcgtaattcgagtgacttttccccaccattcgactatcttgtttagcatataaaacaaattacaccgataacagcgaatattacgctaatgtcggctttaacgttaagcctgtaaaacgagatggtaagatgagcgtaatgtttgatccagacacggcgatttatcctttccccccgaagccgacgccgttaagcattgatgaaaaagcgtattaccgcgagaagataaaacgtctgctaaaagaacgtaatgcggtgatggttgcccactactataccgatcccgaaattcaacaactggcagaagaaaccggtggctgtatttctgattctctggaaatggcgcgcttcggtgcaaagcatcccgcttctactttgttagtcgctggggtgagatttatgggagaaaccgccaaaattctcagtccggaaaaaacaattctgatgccgacacttcaggctgaatgttcactggatctcggctgccctgttgaagaatttaacgcattttgcgatgcccatcccgatcgtactgtcgtcgtctacgccaacacttctgctgcggtaaaagcgcgcgcagattgggtggtaacttcaagcattgccgtcgaacttattgatcatcttgatagtttgggtgaaaaaatcatctgggcacccgacaaacatctggggcgttacgtgcaaaaacagacgggtggagacattctatgctggcagggtgcctgtattgtgcatgatgaatttaagactcaggcgttaacccgcttgcaagaagaatacccggatgctgccatactggtgcatccagaatcaccacaagctattgtcgatatggcggatgcggtcggttccaccagtcaactgatcgctgctgcgaaaacattgccacatcagaggcttattgtggcaaccgatcggggtattttctacaaaatgcagcaggcggtgccagataaagagttactggaagcaccaaccgcaggtgagggtgcaacctgccgcagctgcgcgcattgtccgtggatggccatgaatggccttcaggccatcgcagaggcattagaacaggaaggaagcaatcacgaggttcatgttgatgaaaggctgcgagagagggcgctggtgccgctcaatcgtatgctggattttgcggctacactacgtggataacgaataataaggcgtaacgttacgctttgggggaaagatggatttttttagtgtgcagaatatcctggtacatataccaataggggcaggcggttatgatctctcatggatcgaagcggtaggcacgatcgccgggttgctgtgtattggccttgccagtctggagaagatcagcaactacttctttggcctgatcaacgtcaccttgtttggcattattttctttcagattcagctgtatgccagcctgctattacaggtgtttttctttgccgcgaatatttacggttggtatgcgtggtcgcgacaaaccagtcagaacgaggcggagttgaaaattcgctggttgccattgccgaaggcactcagctggttggcggtttgcgttgtttcgattggtctgatgacggtatttatcaatccggtgtttgcatttttgacccgcgtggcagtcatgatcatgcaagcattaggattacaggttgtgatgcctgaactgcaaccggacgctttcccgttctgggattcatgcatgatggtgttatctatcgtggcaatgattctgatgacgcgtaagtatgtggaaaactggctgttgtgggtgattattaacgtgattagcgtcgttatttttgcacttcagggcgtttacgccatgtctctggagtacatcatcctgacctttattgcgctcaacggcagccggatgtggatcaacagcgcacgtgaaagaggctcacgcgcgctgtcccattaatggtgatgatgtgaatggccagacaccccttcattcaggtggcagtctggcccatgacaaggttgatattccatctgaatggtggcgtgctcaatctgatagtgatccatcaggtagtgttggatctgatccaacaaggcatcgtgatcgtgtggcgggatcacctgcacatgcaacgtcatcaccggcttctcgcctaccatccatacatgtacatggtgcacattgcggacttccgggatttcccggcacatacgacgcttcagttcagcgatatccagcgataccggtgcaccttcaagtaattcattcacgctatctttcaacagtcgccacgcgctacgcagaaccagaagcgacaccagtatcgagagaatggggtcagcaggtgtccagccagtccagataataatcaacgcggcaataatagccccaaccgaacccagcaggtccccgagcacatgcagtgccgctgctcgtacgttgaggtttttctcttcgctgccgtgatgaagtaaccagaaagaaagtatatttgccagcaacccagccacggcaattgccatcatcatgccgccctcgaccggacgcggcgtgcggaagcgttctatcgcctcccagacaatcaaaatggtaattaccacgagggctatggcattcacaaacgccgcgagcgtggtcagtcttagccaaccgaaagtgtggcgaatggtgggaggacgacgtgaaaattgcacggcgagtagggcgaaaagcagggcggcagtatcggtcaacatatgacccgcatcggccagcaatgccagagaaccagaaagaaaaccaccaacgacttctaccagcataaacccggcagtcacgccgaaagcatacaacaagcgacgagcattattatcttctggcaggtgtgaggacgtgtgtgagtgtgagtgcgccatgacgagtcatcccttaattattctcacttaactttatgacatcatactgcttttagaagtgaaaaattaaaagggagagactccgctctcccattattggctattttgcagggttactgcgtggtaccgtcggttttggtatcgacatcattattgatgccatcaccggtttgtacctttttattgatatccggacagcgaccatctttgcacatggtgttcttgtgctcttcatctttggtcattccgtcattgttcattgaagaaccatccgaatgcagcattgtgccgccagaaccggtatttaccccgttattgtcgacgttatttggcgcgacattttcacgggcgtcaggggctacctggcccgcatcagctgcggcgtttgcctggccgttattagtttgcgctccgctatcggcagccagtgcggcaccgctggcaaggcttagagtggcagtcagaaataatgtggccagttttgtcattttcataggatgctcctgttatggtcgttatgtcggataacctcttccaacagtgcatttgcaggtgaatataaggcattggtttaagatttcagccaggttatgaaacgcagcagagaatcttgaaataattaacaaacaaaggagttacagttagaaattgtaggagagatctcgtttttcgcgacaatctggcgtttttcttgctaattccaggattaatccgttcatagtgtaaaaccccgtttacacattctgacggaagatatagattggaagtattgcattcactaagataagtatggcaacactggaacagacatgaattatcagaacgacgatttacgcatcaaagaaatcaaagagttacttcctcctgtcgcattgctggaaaaattccccgctactgaaaatgccgcgaatacggttgcccatgcccgaaaagcgatccataagatcctgaaaggtaatgatgatcgcctgttggttgtgattggcccatgctcaattcatgatcctgtcgcggcaaaagagtatgccactcgcttgctggcgctgcgtgaagagctgaaagatgagctggaaatcgtaatgcgcgtctattttgaaaagccgcgtaccacggtgggctggaaagggctgattaacgatccgcatatggataatagcttccagatcaacgacggtctgcgtatagcccgtaaattgctgcttgatattaacgacagcggtctgccagcggcaggtgagtttctcgatatgatcaccccacaatatctcgctgacctgatgagctggggcgcaattggcgcacgtaccaccgaatcgcaggtgcaccgcgaactggcatcagggctttcttgtccggtcggcttcaaaaatggcaccgacggtacgattaaagtggctatcgatgccattaatgccgccggtgcgccgcactgcttcctgtccgtaacgaaatgggggcattcggcgattgtgaataccagcggtaacggcgattgccatatcattctgcgcggcggtaaagagcctaactacagcgcgaagcacgttgctgaagtgaaagaagggctgaacaaagcaggcctgccagcacaggtgatgatcgatttcagccatgctaactcgtccaaacaattcaaaaagcagatggatgtttgtgctgacgtttgccagcagattgccggtggcgaaaaggccattattggcgtgatggtggaaagccatctggtggaaggcaatcagagcctcgagagcggggagccgctggcctacggtaagagcatcaccgatgcctgcatcggctgggaagataccgatgctctgttacgtcaactggcgaatgcagtaaaagcgcgtcgcgggtaaggtttaattgtcggatgcgccgtcagagtggcgtatccgatgaatcaccacaggcctgataagtcgcgcagcgtcgcatcaggcaatgtgctccattgttagcaacaaaaaagccgactcacttgcagtcggctttctcattttaaacgaatgacgtttacttcgctttaccctggtttgcaaccgccgctgctttcgctgcgatctcgtcagcattacccagataatagcgtttcagcggtttgaaattctcgtcgaactcatacaccagcggcacgccagtcgggatattaagctcaagaatctcttcttcgctcatgttatcaagatatttcaccagcgcacgtaaagagttaccgtgtgcagcgatgatcacgcgctcaccgctcttcatacgcggcagaatagtttcattccagtaagggatcacgcggtcaatggtcagcgccaggctttccgtcagcggcagttctttctcgctcagtttcgcgtaacgcggatcgtgacccggataacgctcatcatctttagtcagttccggcggagtcactgcaaaaccacgacgccactgtttcacctgctcgtcgccatacttttcagcagtttccgctttgttcagaccctgcaacgcaccgtagtgacgttcgttcagtttccaggatttctcaacgggcagccatgcctgatccagttcgtccagcacattccacagggtatggatagcgcgtttcagcacagaagtgtaagcaaagtcaaagctgtaaccttcctctttcagcagcttacctgctgcttttgcttcgcttacgcctttctcagacagatccacgtcgtaccaaccggtgaaacggttttctttgttccactgactttcgccatgacgaaccagaaccagcttagttacagccatatacttactcctcaaatcatcttttaatgataataattctcattatattgccgcgacgaagcaacagcaatgcttacgcataaccatagcgaaaatagtggcgcagtgtaaggttgttgtgaatattgagttgcaaatatgtcggtgtttgctggtgatttgaacaatatgagataaagccctcatgacgagggcgtaacattactcagcaataaactgatattccgtcaggctggaatactcttcgccaggacgcaggaagcagtccggttgcggccattcagggtggttcgggctgtccggtagaaactcgctttccagagccagcccttgccagtcggcgtaaggttcggttccccgcgacggtgtgccgccgaggaagttgccggagtagaattgcagagccggagcggtggtgtagaccttcagctgcaatttttcatctgctgaccagacatgcgccgccactttcttgccatcgcctttggcctgtaacaagaatgcgtgatcgtaacctttcactttgcgctgatcgtcgtcggcaagaaactcactggcgatgattttggcgctgcggaaatcaaaagacgttccggcgacagatttcaggccgtcgtgcggaatgccgccttcatcaaccggcagatattcgtccgccagaatctgcaacttgtgattgcgcacgtcagactgctcgccgtcaagattgaaatagacgtgattagtcatattcaccgggcaaggtttatcaactgtggcgcgataagtaatggagatacggttatcgtcggtcagacgatattgcaccgtcgcgccgagattacccgggaagccctgatcaccatcatctgaactcagggcaaacagcacctgacgatcgttctggttcacaatctgccagcgacgtttgtcgaacccttccggcccgccgtgcagctggttaacgccctgacttggcgaaagcgtcacggtttcaccgtcaaaggtataacggctattggcgatacggttggcataacgaccaatagaggcccccagaaacgcggcctgatcctgatagcattccgggctggcacagccgagcagcgcctcgcggacgctgccatcggaaagcggaatacgggcggaaagtaaagtcgcaccccagtccatcagcgtgactaccatccctgcgttgttacgcaaagttaacagtcggtacggctgaccatcgggtgccagtgcgggagtttcgttcagcactgtcctgctccttgtgatggtttacaaacgtaaaaagtctctttaatacctgtttttgcttcatattgttcagcgacagcttgctgtacggcaggcaccagctcttccgggatcagcgcgacgatacagccgccaaatccgccgccggtcatgcgtacgccacctttgtcgccaatcacagctttgacgatttctaccagagtgtcaatttgcggcacggtgatttcgaaatcatcgcgcatagaggcatgagactccgccatcaactcgcccatacgtttcaggtcgccttgctccagcgcgctggcagcttcaacggtgcgggcgttttcagtcagtatatgacgcacgcgttttgccacgatcgggtccagttcatgcgcaacagcgttgaactcttcaatggtgacatcacgcagggctggctgctggaagaaacgcgcaccggtttcgcactgttcacgacgggtgttgtattcgctgccaaccagggtacgtttgaagttactgttgatgatgacgacagccacacctttgggcatggaaactgctttggtccccagtgagcggcaatcgatcagcaaggcatgatctttcttgccgagcgcggaaattagctgatccatgatcccgcagttacagcctacaaactggttttctgcttcctgaccgttaagcgcgatttgtgcgccgtccagcggcagatgataaagctgctgcaatacggttccgaccgcgacttccagtgaagcggaagaacttaacccggcaccctgcggcacattgccgctgatcaccatgtccacgccgccgaagctgttgttacgcagttgcagatgtttcaccacgccacgaacgtagttagcccattgatagttttcatgtgcgacaatgggcgcatcgagggaaaactcgtcgagctgattttcataatcggctgccatcacgcgaactttacggtcatcgcgtggtgcacaactgatcacggtttgataatcaatcgcgcagggcagaacgaaaccgtcgttgtagtcggtgtgttcaccaatcaaattcacgcggccaggcgcctgaatggtgtgagtggcagggtagccaaatgcgttggcaaacagagattgtgttttttctttcagactcatttcttacactccggattcgcgaaaatggatatcgctgactgcgcgcaaacgctctgctgcctgttctgcggtcaggtctcgctgggtctctgccagcatttcataaccaaccataaatttacgtacggtggcggagcgcagcagaggcggataaaagtgcgcgtgcagctgccagtgttgattctcttcgccattaaatggcgcgccgtgccagcccatagagtaggggaaggagcactggaagaggttgtcataacgactggtcagctttttcaacgccagcgccagatcgctgcgctgggcgtcggtcaaatcggtgatccgtaaaacgtgggctttgggcagcagtagcgtttcgaacggccaggcagcccagtaaggcacggcggctaaccagtgttcggtttcgacaacggtacggctaccgtctgccagctcgcgctgaacataatccaccagcattggtgatttctgttcggcaaaatattctttttgcaggcggtcttcgcgctcagcttcgttaggcaggaagctatttgcccaaatctgaccgtgcggatgcgggttagagcagcccatcgccgcgcctttgttttcaaaaacctgcacccatgggtacgttttccccagttctgcggtttgctcctgccaggttttgacgatttccgtcaatgctgcaacgctgagctctggcagcgttttactgtgatccggtgaaaagcagatcacccggctggtgccgcgcgcgctctggcaacgcatcagcggatcgtgactttctggcgcatctggcgtgtcagacatcaaagccgcaaagtcattagtgaaaacgtaagtcccggtgtaatcggggtttttatcgcctgtcacccgcacattacctgcgcagaggaagcaatctggatcgtgcgcaggtaacacctgtttggctggcgtttcctgcgccccctgccaggggcgcttagcgcggtgcggtgaaaccagaatccattgcccggtgagcgggttgtagcggcgatgtggatgatcaacgggattaaattgcgtcatggtcgttccttaatcgggatatccctgtggatggcgtgactgccagtgccaggtgtcctgcgccatttcatcgagtgtgcgcgttacgcgccagttcagttcacggtcggctttgctggcgtccgcccagtaggccggaaggtcgccctcgcgacgcggtgcaaaatgataattaaccggtttgccgcaggctttgctgaaggcattaaccacgtccagcacgctgttgcctacgccagcgccgaggttgtagatgtgtacgcctggcttgttcgccagtttttccatcgccacgacgtgaccgtccgccagatccattacgtggatgtaatcgcgtacgccagtaccatcttcggtcggataatcgttaccaaaaatcgccagcgagtcgcgacggcctacagcaacctgggcgatgtatggcatcaggttattcggaatgccttgcggatcttcgcccatatcgcccgacggatgcgcgccaaccgggttgaagtagcgcagcagggcaatgctccagtccggctgggctttttgcagatcggtgaggatctgttccaccatcagcttgcttttgccgtaagggctttgcggtgtgccggtcgggaagctttcaacgtatggaattttgggctgatcgccataaacggtggcggaggagctaaaaataaagtttttgacgttagcggcgcgcatggcgctaatcaggcgcagagtgccgttgacattgttgtcgtaatattccagcggtttttgtaccgattcgcccacggctttcagcccggcgaagtggatcacggtgtcgatagcgtgatcgtgcaggatctcggtcatcaacgcttcgttacgaatatcgccttcaacaaacgttggatgtttgccgcctaaacgctcgataacaggcagtacgctgcgcttactgttacagaggttatcaagaatgatgacatcatgaccgttttgcagtaattgcacacaggtatgacttccaatgtaaccgctaccaccggtaaccagaactctcataattcgctccattaggcttatggtatgaaataaccatagcataacaaagatgcgaaaagtgtgacatggaataaattagtggaatcgtttacacaagaatttagccgttttttatgcgcgattaagtgattataaaacagagggtttatgaatgattgcgctttttatctgaaaaaagacgcggtttcatgcctgcatgcgtcgaaccgttggccggagagggcgctaaggccgcctccggcaaggtcagcactaccgactcaatatatttttgtcagcacatagcgatagagtccaccgtccggcacgaactcaagacgatgggtaatacaggcaggcgcatcttcagcgtggtgcgaaacaaacaacaattgcgtttcaccttcgctaatcagcacatcaacaaaacggcggataagctggcgattcagcggatcaagcccctgtagtggttcatcgagaataagcaacgtcggatgtttcaccagtgcgcggacaatcagcgccagacgctgctgtccccaggaaagactatggaacggagcgtcagccgtgcgtttatcaatgccgagaatatccagccactgctgcaccagtttttgctggcgatccgaaacggcctgataaatgccaatcgaatcaaaatagccagaaagaatcacattacgcacggtagtgctgacccggtaatccagatgcaaactactgctgacgtaaccgatatgctttttgatatcccagatggtttcgccgctgccgcgacgtcgtccgaaaagcgtcaaatcattttatatcccactttgtgcagcgattactgacagggatacgtgtttcataacaaattgtcaacacgcttagcacagcgtggcgataatcacgctgtcggcattaaagtaggccgtgacattctgtccttgctgaagagaagtcgcttcatttaccggcactgtggcgcacagtgtttgcccgtcgggtagcgccattaatacttcgcactgctctgcgccgcgctcaatatgactaataatacccggtaattggttgtcagcgttttgcgcgaccgcctcgtcctgagtaatacctacccacggcgcttttagcaatatcaacacttctttgccttcatccagccccagacgcgcgccgctttgtgcggtaattgcgactttcaggcgtgtttttccgtcagccagtaagacatcaacatgctgttgaacgtcatcatgatcgcgggcggtgatggtaccgaaccactggttacgggcgctggtttgcagtgaaaaacgtgagatcgcggccagcaggctgttcagcggcagggcgtcatcgtcacttaacacatcaaaggctttttgctggatttgcgccagtaagtcatagagctgaatcagtcgctgaccatagcgggtcagtactgcgccgccgccacctttaccgcctgttgcgcgctcgaccagaatatgctcacttaactgattcatctcgttaatggcatcccaggcgcttttatagctaataccggcatctttcgctccctggctaatggaaccggaaagcgcaatgtgttttagtagcgaaatgcggcgcgggtcggcgaataatttttgttggagcttaagggtgagaaggatttcggcctgcataacaatgtcctggcaaaagtcttattgtgacggaaaacgaacgccacgcaaagctgaccgcacaaaaggggagtgcttttctgtgcttagcggttagaatagtctcatgactatatctggagttgaccatgttagagttattaaaaagtctggtattcgccgtaatcatggtacctgtcgtgatggccatcatcctgggtctgatttacggtcttggtgaagtattcaacatcttttctggtgttggtaaaaaagaccagcccggacaaaatcattgattccctgaatgcccgcttagtcgggcattttctttttctcaacttcctgcttttcctgccgatattttttcttatctacctcacaaaggttagcaataactgctgggaaaattccgagttagtcgttatattgtcgcctacataacgttacattaaggggttaccaatggctcgtaaatggttgaacttgtttgccggggcggcactctctttcgctgttgctggcaatgcactggcagatgaagggaaaatcacggtgttcgccgccgcatcactgactaacgcaatgcaggacattgctacgcagtttaaaaaagagaaaggcgtggatgtggtttcttctttcgcttcgtcatctactctcgcccgtcagattgaagcgggtgcgcctgcggatctgtttatttctgccgatcagaaatggatggattatgcggttgataaaaaagcgatcgatacagctacgcgtcagacactgctcggcaatagcctggtcgttgtagcaccgaaagccagcgtgcagaaagatttcaccatcgacagcaaaaccaactggacttcactgctgaatggcggtcgcctggcggttggcgatccggaacatgttcccgctggcatttatgcaaaagaagcactgcaaaaactgggcgcatgggatacgctctctccgaaactggccccagcggaagatgttcgtggggcgctggcgctggtcgaacgtaacgaagcgcctctgggcattgtctacggttctgacgcagttgccagcaaaggggtaaaagtggttgccaccttcccggaagattcacataaaaaagtggaatatccggttgctgttgtggaagggcataacaatgcgacagtgaaagcattttatgattatctgaagggaccgcaggcagcggaaatctttaaacgttacggatttacaatcaagtaatgatactgaccgatccagaatggcaggcagttttattaagcctgaaagtttcttccctggctgtgctgtttagcctgccgtttgggatcttttttgcctggttactggtgcgttgcacgtttccgggcaaagctctgctcgacagcgtactgcatctaccgctggtgttaccgcccgtggtcgtcggttacttattattagtttcgatgggacggcgcggatttatcggtgaacgtctgtatgactggtttggtattaccttcgcctttagctggcgcggcgcggttctcgctgccgccgtcatgtcgtttccgctgatggtgcgggcaattcgtctggcgctggaaggggttgatgtcaaactggaacaggccgcaagaacactgggggccgggcgctggcgcgttttctttactatcacgttaccgctgaccttaccgggaattattgttggtacggtactggcttttgctcgttctctcggtgagtttggtgcaaccatcacctttgtgtcgaacattcctggtgaaacgcgaaccattccttctgccatgtataccctgatccagacccccggcggggaaagtggagcggcgagactgtgcattatttctattgcgctggcgatgatctccctgttgatttcagaatggctggccagaatcagccgtgaacgggcggggcgctaatcatgctggaactgaatttttcccagacgttgggcaaccattgcctgactattaatgaaacgctgcccgccaatggcatcactgctatctttggcgtctccggtgccggaaaaacttcgctgattaacgccatcagtggactgacgcgcccgcaaaaagggcggattgtcctcaatgggcgggtactaaatgatgccgaaaaaggtatctgcctgacgccggaaaagcgtcgcgttggctatgtttttcaggatgcgcggctgttcccgcattacaaagtgcgtggcaatctgcgctacggcatgtcgaaaagtatggtcgatcagttcgataagctggtggcgcttttaggcattgaaccgttgcttgaccgtttaccaggcagcctgtccggaggcgaaaaacagcgcgtggcgattggtcgggctttgctgacagcaccggaattgctgttgctggatgaaccgctggcgtcactggatattccgcgtaaacgcgaactgttgccttatctgcaacggctgacacgggaaatcaacattccgatgttgtatgtcagccattcgctggatgagatcctccatctggcagacagagtgatggtactggaaaacggtcaggtgaaagcctttggcgcgctggaggaagtgtggggcagtagcgtgatgaatccgtggctgccgaaagagcaacaaagtagcattctgaaagtgacggtgcttgagcatcatccgcattacgcgatgaccgcgctggcgctgggcgatcagcatttgtgggtcaataagctggacgaaccgctgcaagctgcgctacgtatccgcattcaggcttccgatgtttctctggttttacaaccgccgcagcaaaccagcattcgtaacgtattgcgggcaaaagttgttaatagttatgacgacaacggccaggtggaagtggaactggaagtcggcggtaaaacgctgtgggcgcgtatcagcccgtgggccagggatgaactggcgatcaaacctggcctgtggctgtacgcgcaaattaaaagtgtgtcgataaccgcctgattaaatcaggtggctataaatgaactgggcaatgctgtcggtggtgttatcaccaatcacaatgttggcgcgcgcttttaccgcgtcatcggcgttgcccatcgccacgcctgtaccagcggcttccagcatactgatatcattaaagttatcgccgaatgccacgacgttttccatcgaccaaccttgcgcctcaacccatttcgtcaaacgtttacctttgctgttgccgccgcgtgcaatatcaacctgatcgtgccaggaccattcacactccagtcccagttcatgttcgacatgcttaccaaaatgctgcaattgcggcaggtcatcgtgcgtcagggcgaacttccatacggcgttaacttgttgcgccgtttcagccagagaagcgacttgtgtgaaagtcggacgctgttccggcggcagggtttgcgcccagttagatgtgcgaatgacatgcccggtcgggtgctcatagaccattgcatcatcgacatacatcagaccgtgaatgtggtgttcattcagcatctcaatgagttgcagggctttaataacgggcattgggtccgcttccagcacggtttttgcatgataatcatacaaataggtgccattacagcaaatagcaggtgtatccagcgccagcgcctgataaaaaggatgaatagcgacgtgatggcgacctgtgacgatgattaattgatagcctgcttcgcgagcgcgggccagggcttctatcgatgaaggaagcagggtctttttcggggtcaataaggtgccgtctaagtcgagagcaatcacgcgtgtggtcatggcgtattccagattaaggttaagaattttcgtctgcgcgaatggtacaccgataccactatcggacaaaattctgcgttttaattcagcattcaccgccaaaagcgactaattttagctgttacagtcagttgctaaatgcaaaggagcattcatgaagcaaacagtttatatcgccagccctgagagccagcaaattcacgtctggaatctgaatcatgaaggcgcactgacgctgacacaggttgtcgatgtgccggggcaggtgcagccgatggtggtcagcccggacaaacgttatctctatgttggtgttcgccctgagtttcgcgtcctggcgtatcgtatcgccccggacgatggcgcactgacctttgccgcagagtctgcgctgccgggtagtccgacgcatatttccaccgatcatcaggggcagtttgtctttgtaggttcttacaatgcgggtaacgtgagcgtaacgcgtctggaagatggcctgccagtgggcgtcgtcgatgtggtcgaggggctggacggttgccattccgccaatatctcaccggacaaccgtacgctgtgggttccggcattaaagcaggatcgcatttgcctgtttacggtcagcgatgatggtcatctcgtggcgcaggaccctgcggaagtgaccaccgttgaaggggccggcccgcgtcatatggtattccatccaaacgaacaatatgcgtattgcgtcaatgagttaaacagctcagtggatgtctgggaactgaaagatccgcacggtaatatcgaatgtgtccagacgctggatatgatgccggaaaacttctccgacacccgttgggcggctgatattcatatcaccccggatggtcgccatttatacgcctgcgaccgtaccgccagcctgattaccgttttcagcgtttcggaagatggcagcgtgttgagtaaagaaggcttccagccaacggaaacccagccgcgcggcttcaatgttgatcacagcggcaagtatctgattgccgccgggcaaaaatctcaccacatctcggtatacgaaattgttggcgagcaggggctactgcatgaaaaaggccgctatgcggtcgggcagggaccaatgtgggtggtggttaacgcacactaaccgctgatttacccggcgcagtctctcctgcgccggtgtattaacctatctcctgtaacgcgtgtctctggcgttcgacgatattggtccacaaattgtctttatcgtcagtccataaattaatcagcaaggcaaaaaagcgttctgctgctggagaaagtacggcatctttacggcgaattattcccaatgttcgacgtataacgggttccaccaatgggataccaataatcgaagaatagggcgcatgaggcattgccaggccaggaagcgccgaaatccccagtcccgcctccaccagtcctaatgacgtcgaaagatgacgcacttcgtaaaaccagtccagcttccagggcttgtcggccagctgttgttctatcaacagtcggttgccgctggaggagcgtacgccaatcattttgtaacccactaactcctgccattctacaagctgctttttggccaatggatggtcacgccgacaggccagcacgaacggctcgttgaccagtggggtaaaatcaatggatgaatttgtgacgttgttcatgtttatgccaaagtctgattcgttacacagcaccgattccatgcaattattcgtgccttgttccagaatccgcactttaatattgggatacagctcattaaatttaccgattgccagcggtaaaaaataaaatactgcggtcggaatacacgctaacgtcaccataccacgatgataagcattcatatcacgaatattaaaaagcgtttcatcgaatttctttattaattcccgcgcctccgggagcaacctttttcctgcttttgttaacgtaaccttgcgagttgtacgctcaaatagttgaatatgtaaatcttcctccatcttttttattcttcgcgttaatgcaggttgcgtaatattgagtaatttagcggcattgttaaacgaactggactctgccagtatgacaaatgccttcatacttgataattcatgcttcattattactccggaaaatggaagcgacgattttgggtggctggccgttaaaaattttaactgcatttagccaacttaaattaatgaaaaaatgttattaatcgttgagctaaagtcattagagatgctttgccctgagagatcccctcataatttccccaaagcgtaaccatgtgtgaataaattttgagctagtagggttgcagccacgagtaagtcttcccttgttattgtgtagccagaatgccgcaaaacttccatgcctaagcgaactgttgagagtacgtttcgatttctgactgtgttagcctggaagtgcttgtcccaaccttgtttctgagcatgaacgcccgcaagccaacatgttagttgaagcatcagggcgattagcagcatgatatcaaaacgctctgagctgctcgttcggctatggcgtaggcctagtccgtaggcaggacttttcaagtctcggaaggtttcttcaatctgcattcgcttcgaatagatattaacaagttgtttgggtgttcgaatttcaacaggtaagttagttgctagaacccatggctcctttgccgacgctgagtagattttaggtgacgggtggtgacaatgagtccgtgtcgagcgctgattttttcggcctttagagcgagatttatacaatagaatttggcatgagattggattgcttttagtcagcctcttatagcctaaagtctttgagtgactagatgacatatcatgtaagttgctgataggtttccagttttccgctcctaggtctgcatattgtacttttcctcttactcgacttaaccagtaccaacccagcttctcaacggatttataccatggcactttaaagccagcatcactgacaatgagcggtgtggtgttactcggtagaatgctcgcaaggtcggctagaaattggtcatgagctttctttgaacattgctctgaaagcgggaacgctttctcataaagagtaacagaacgaccgtgtagtgcgactgaagctcgcaataccataagtcgtttttgctcacgaatatcagaccagtcaacaagtacaatgggcatcgtattgcccgaacagataaagctagcatgccaacggtatacagcgagtcgctctttgtggaggtgacgattacctaacaatcggtcgattcgtttgatgttatgttttgttctcgctttggttggcaggttacggccaagttcggtaagagtgagagttttacagtcaagtaatgcgtggcaagccaacgttaagctgttgagtcgttttaagtgtaattcggggcagaattggtaaagagagtcgtgtaaaatatcgagttcgcacatcttgttgtctgattattgatttttcgcgaaaccatttgatcatatgacaagatgtgtatccaccttaacttaatgatttttaccaaaatcattaggggattcatcagtgctttgcccttaatgtaaccatatcgcaataagttatgtttttaaattgagggcattattatgaaaaaaataccctgcgtgatgatgcgaggtggaacctcgaggggcgcgttcctgttagcggaacatttacccgaagatcaaacgcagcgcgataaaatattgatggcaattatgggttccggtaacgatctggaaattgacggtattggcggcggtaatccactgaccagtaaagtcgccattattagccgttccagcgatccgcgtgctgatgtcgattatctgtttgcgcaggtaatcgttcatgagcaacgtgtcgataccacgcctaactgcggcaatatgctgtctggtgttggggcattcgccattgaaaatggtttgattgcagcgacttcgccagttactcgcgtacgtatccgcaacgtcaatacgggtacgttcatcgaagctgatgtgcaaacgccaaatggtgttgtcgagtacgagggtagcgccagaattgacggcgtaccgggtactgccgcaccggttgcgctcactttcctgaatgccgctggaaccaaaaccggaaaagttttcccgactgataatcagattgattattttgacgatgtcccggtgacctgtatcgatatggcgatgccagtcgtcattattccggctgaatatctgggaaaaacaggttatgaattaccggcggaactggatgccgacaaagcattattagcccgcattgaatctatccgtctacaagcgggtaaagcaatgggcttaggtgatgtcagtaatatggttatccctaaacctgtgcttatttctccagcgcagaaaggcggggcaattaatgtgcgttattttatgccgcattcttgccatcgcgcgctggcgataaccggtgctattgctatttccagtagttgtgcattggaaggcaccgtcacccgacaaatcgtcccttctgtaggatacggcaatatcaatattgaacaccccagtggtgcgctcgacgttcatttaagtaatgaaggtcaggatgccacgacgttacgcgcatctgttattcggacgaccagaaaaatattttccggtgaagtttatcttccctgaaaaaattcgttgtcaggataaggacaatcaataaaggacttctgtatgagtcatacagaaagaacaggattttaaatgaataagaaatcgttatggaagctaattctgatattagcgatcccatgtattattggttttatgccagctccggcaggattaagcgaactggcgtgggtgctttttggtatttacctggcggccattgtggggctggttatcaagcctttcccggaacctgtcgtactgttaattgccgttgctgcctcaatggtggtggtcggtaacttatccgacggtgcgtttaaaaccaccgccgtattaagcggttactcttcaggtaccacctggctggtgttctcggcgtttaccttaagcgccgcatttgtgaccaccggtttaggtaaacgtattgcctatctgctgattggtaaaatcggtaacaccacgctgggtctgggttacgttacggtattcctcgatctggtactggctccggcaacaccgtctaacaccgcgcgtgcgggcggcattgtgttaccgatcatcaacagcgtggcggtggctttggggtccgaaccggaaaaaagtccgcgtcgtgtcggacattacctgatgatgtccatttacatggtcaccaaaaccaccagctatatgttctttaccgcaatggcggggaacattctggcgctgaaaatgatcaacgacattctgcacctgcaaattagctggggtggatgggcgctggcagccggattgccgggcatcattatgctgctggtcaccccgctggtgatttacaccatgtatccaccagaaattaagaaggtggataacaaaaccatcgctaaagcgggccttgccgaactaggaccgatgaaaatccgcgaaaaaatgctgctcggtgtctttgtgctggcgctgctgggctggattttcagtaagtctctgggggttgatgaatccaccgtggcaatcgttgttatggcaaccatgctgctgctgggtatcgttacctgggaagacgtggttaaaaataaaggcggctggaataccttaatctggtacggcggtattatcggcttaagctccttattatcgaaagttaaattcttcgaatggttagctgaagtctttaaaaataacctggcatttgatggtcacggtaacgttgctttcttcgttattattttcctcagcattatcgtgcgttatttcttcgcttccggtagtgcctatatcgttgctatgttaccggtatttgccatgctggcgaacgtctccggcgcaccgttaatgttaaccgcgctggcactgttgttctccaactcctatggcggcatggttactcactatggcggcgcggcaggtccggtcatctttggcgtgggttataacgatattaaatcctggtggttggtcggtgcggtactgacgatattaaccttcctggtgcatatcaccctcggcgtgtggtggtggaatatgctgatcggctggaacatgctgtaaatattctcgtcatacttcaagttgcatgtgctgcgtctgcgttcgctcaccccagtcacttacttatgtaagctcctggggattcactcgcttgtcgccttcctgcaactcgaattatttagagtatatccatttattatctttctgcgcacttcacggtgcgcagatatctggagcatttgatgatcaagttatctgaaaaaggcgtgtttctcgccagtaataacgaaataattgccgaagaacatttcaccggcgaaattaaaaaagaagaagccaaaaaaggcactattgcctggtctattctctcttcgcataatacgtccggaaatatggataaacttaaaattaagtttgattcattagcctctcacgatattacctttgttggtattgtacagaccgctaaagcgtccggtatggaacgtttcccgctgccgtatgtgctgaccaactgccataactcactctgcgccgtcggcggcactattaacggtgatgaccatgtttttggtttatcggcggcccagcgttatggcggtatttttgtgcctccgcatattgcggtcatccatcaatatatgcgtgagatgatggcaggcggcggcaaaatgatcctcgggtcagacagccacacccgttacggtgcattagggacaatggcagtcggtgagggcggcggtgagttggtaaaacagctgcttaatgacacctgggatatcgactatccgggcgtggttgcggtgcatctgaccggaaaacctgcgccgtatgtggggccacaggatgtggcgctggctatcattggcgcggtgttcaaaaacggttacgtcaaaaacaaagtcatggagttcgttggaccgggcgttagcgcgctctctaccgatttccgtaacagcgttgacgtgatgaccactgaaacgacctgtttaagttctgtctggcaaaccgatgaagaagtccataactggctggcgctgcacggtcgcggccaggattactgccagcttaaccctcaaccgatggcgtactacgatggctgcatcagcgttgatttaagcgccatcaaaccaatgattgcgctgccgttccacccgagcaacgtgtatgaaatcgacacactgaaccagaacctgaccgacattctgcgtgagattgaaattgagtccgaacgcgtggcgcacggtaaagccaaactctcgctgctggataaagtggaaaatggtcgcctgaaagtgcagcaggggattatcgcgggctgttctggcggtaactacgaaaacgtcatcgcggcggcgaatgcactgcgcggtcaatcctgtggcaatgacaccttctcgctggcagtttacccgtcatcacagccggtgtttatggatctcgccaaaaaaggtgtggtagcagatttgattggcgcaggcgcaatcatcagaaccgcgttctgcggcccatgctttggcgcgggcgatacgccaatcaacaacggtttgagtattcgccacaccacgcgtaacttcccgaaccgcgaaggctctaagccagctaatgggcagatgtcagcggtggcgttgatggacgctcgttctatcgctgcgactgcggcaaacggtggctatttaacctctgccagcgaacttgattgctgggacaacgtgccggagtacgccttcgatgtaacgccgtataaaaaccgtgtttatcagggctttgtgaaaggggcaactcagcaaccgctgatttacgggccgaacattaaagactggccggaattgggtgcgctgactgacaatatcgtcctgaaagtgtgctcgaagatcctcgacgaagtgaccaccaccgacgaactgattccttccggtgaaacctcttcttatcgttcaaatccgattggtctggcggagtttaccctgtctcgccgcgatcccggttatgttagcagaagtaaagcgactgctgagctggaaaatcagcgtctggcggggaatgtcagcgagctgacagaggtgtttgcgcgcattaagcagattgctggtcaggagcatattgatccgctgcaaactgaaattggcagcatggtctatgcggtgaaaccaggcgatggttctgcgcgtgaacaggcggcgagctgccagcgtgtgattggcggtctggcgaatattgccgaggagtacgcgactaaacgctatcgttctaacgtcatcaactgggggatgttaccgctgcaaatggcggaagtaccaacctttgaagtgggggattacatttacatccctggcattaaagcggcgctggataatccgggtacgacgtttaaaggttatgtgatccatgaagatgcgccggtaacggaaattacgctctatatggaaagtctgactgctgaagagcgcgagattatcaaggcgggtagtttgattaacttcaataaaaaccgtcagatgtaaaaagcgccatgtgaatgtaggtcgcattcggcacttattgtcggatgcgatgcttgcgcatcttatccgacctacgaatcgcatcgaatctgtaggccagataaggcattttcgcagcatccggcacttattgtcggatgcgatgcttgcgcatcttatccgacctacaaatcgcatcgaaccgtaggccggataaggcgtttacgccgcatccggcaaatagttaattgctcttacttcttcgcctctgcaaccactttactacccacgccgcggttattgtattcccacatgcggttgtagttagtgtcattcagattgcgctgtatttcgtcgttatcatctacgctgccggtattacccgcaaacggacgattagagatcaccgcatcggcccacggtttagccgtgttaaaaccttcgttgatggcgctatcacggatcaccacctgaccgttggtattggcatcaacatccagcgagcggcccagttgcgccacaccatcaccgaaagcattgaaacggctgtttacggcgaggaaaccgtagtaaatgttggacagcgtagccggtgcaaacacatacgcttcttgctgagtacgtgagttcaccacgcggaattcggtgttatcgaacaccactgcgccgcgaccagaaacgatatccacatccccttcaatgtagctgttggtcaccagcgtacgcggctgacgatttgtttccagacggttctgcacaccgctgttggtgacaaagaaggtgttctgacgaccgagaatgttaacgttgttaatctgtacctggtcaccatcagtacgcagtgccaccgccggatggttacctgcatctacgctatcgcccagcgtgttttcgatggtcagattttgcagttgcaggccattgttttgtgaccagaagaccgcagagcagagaacaccgatactgtcgctgcgtttgctctggcagctatcgtacatataccacgctggtttacctggcatatatttgccgcgcgggttgacgtcgtgacgccagtcggcagggctcatgccaccatcaagggaaagcccaatcttcacatcaatcggtttttcacctgtaccgtacagagtaattccacccggagcggcagggacatataccgttccctgatactcaccaggcatcacggcaatatactggcgcttgttggtacgcttgataattgccgcatctaccgccgcctgaatcgtggtatgcgttacaccttgagtgcccgccgggccgacaacaaagtcaggttgcgcaggcagggtaatcggggaaggattccacgctgcagcacctggtgtcagggatgcaaaatagtgttgagcatcgaaattctgcgcttcttttgccgacagaatcgggcgagaagaggtaccaggcgcggtttgatcagaaggacgttgatcgggcggggttgagctacaggcggtcagcgtcacgccaaaagccaatgccagcgccagacgggaaactgaaaatgtgttcacaggttgctccgggctatgaaatagaaaaatgaatccgttgaagcctgcttttttatactaagttggcattataaaaaagcattgcttatcaatttgttgcaacgaacaggtcactatcagtcaaaataaaatcattatttgatttcaattttgtcccactccctgcctctgtcatcacgatactgtgatgccatggtgtccgacttatgcccgagaagatgttgagcaaacttatcgcttatctgcttctcatagagtcttgcagacaaactgcgcaactcgtgaaaggtaggcggatccccttcgaaggaaagacctgatgcttttcgtgcgcgcataaaataccttgatactgtgccggatgaaagcggttcgcgacgagtagatgcaattatggtttctccgccaagaatctctttgcatttatcaagtgtttccttcattgatattccgagagcatcaacatgcaatgctgttgggatggcaatttttacgcctgttttgctttgctcgacataaagatatccatctacgatatcagaccacttcatttcgcataaatcaccaactcgttgcccggtaacaacagccagttccattgcaagtctgagccaacatggtgatgattctgctgcttgataaattttcaggtattcgtcagccgtaagtcttgatctccttacctctgattttgctgcgcgagtggcagcgacagggtttgttgttatatggccttcagctattgcctctcggaatgcatcgctcagtgttgatctgattaacttggctgacgccgccttgccctcgtctatgtatccattgagcattgccgcaatttcttttgtggtgatgtcttcaagtggagcatcaggcagacccctccttattgctttaattttgctcatgtaatttatgagtgtcttctgcttgattcctctgctggccaggattttttcgtagcgatcaagccatgaatgtaacgtaacggaattatcactgttgattctcgctgtcagaggcttgtgtttgtgtcctgaaaataactcaatgttggcctgtatagcttcagtgattgcgattcgcctgtctcggcctaatccaaactctttacccgtccttgggtccctgtagcagtaatatccattgtttcttatataaaggttagggggtaaatcccggcgctcatgacttcgccttcttcccatttctgatcctcttcaaaaggctacctgttattggtcgatttaagtcaacctttactgctgattcgtggaacaaatactctcttccgtccttaatcggtggtgggaatatcctgcactcgcgtacccatcgacgaactgtttcaaggcttcttgggcgccgctggcgtgcgttccactcctgaagtgtcaagtacatcgcaaagtctccgcaattactcgcaagggaacgagtagtggttgattttctccaacaaaaaaggagccgaagctcctttgatgattaaaattcgaattgtctcgcccgaaggcttttcaacattggtcttgcccgttcgaaaacggcgcttgtctggtcaagtcgtgtcgcctccctgagcagtacatctctgtttttcgtcaccgcatagaaggtttcaaacgcaatgtcatacagcttactcgcgtatgatgagttaagttccttcattatcgggtacaggcgtttgcagatgtcctgtgcattctccatctgtacctgcatgtagcagaggaggatgatttcctcgtctgtgaattgctgcgctggttgcatgctgcgaagtttcttttcgcactcgatgaagtatcggcgtatctggcggcctttttcgttgcgctcgaccattgccagctctttggctgtgtcgagggtgaggtggtaatccttgcggttgtgaccgcctctaccagatgtttgctttcccaaattggaaagcaaaatatagtcttgattttcaatgaattcgtattctgaaatgcgatttgtaatccatgccgcaaacacctttttcacgcctaaaaaagcatgcagattgcgggcattgcagagtagggctgtttcgttggcgatagtgccgttgaatacggggatgagttgactggtcatttttatgtcctttgcatttgttcagatagccctgtgttcagcagggcggtcaggtacttgaacaccgtgcaaagtcggcccgtatccttaacctttcggctgtttttcggtatacgcgctacccgaccatatctgagaaatggacataaaaaagccgcatgactgacgggtgcggtttccgctttgcaaggtgtgttcagcaccatgaagcggaatatagccccgttaatgcggatttgtcaaatcatgtaggccttatcttgctgtaagccgcgccattcgggcttttccccatatttggggaaaactatctgcgaattattcacctttgacggcaagttgcaggttagccacgcttaacctcctgcggcggttccggtagcggcatccagtgagttgcttgctcaataccattacccggcttaatcgttgcatctccgcgccgaaaggtgcttccggtatagcgtgcggagcatattagcggttcaaccagagagctatcgaaattcaccgaaataagcacgttctggcccttttcaggcattcgctcactacagcttatccaaccatccttaatgcaattaccttgactctgaagcatagcggcacgacaggcgttccagcctctcacctctgcaatagcggcaacagcatcaaccgcgtacattttaagagggttaggcattggtttttcttccggtactactggaacggggggagcggcgtagacctcaataattccattatcaataggccattctccatccttgaggtagtcacttgcgccgtcaacttgctgttctgcaatgtggaatgcacctattggttttgcttccagcgatgccagtgcaattcgtgccagttcttccgcttcttctgctggcagtacaacgttgctaccaggtccgtatgtttcgcgccactgcttgattgtcagtagtcgctctttggtaatagtggtcataggttagtccttaatcatctgcttgcagtggtggtaaatccggcactgttacgccaaacaatgcagccagcgcacgatagttttgctcactgtgatagcggcctttacagcgaaccagtttttcagcggctgtaacaatcgagctttgttctgctatgcgcttttctgaggcttcaagtaacgcctgcttgtcgcgtagtgcttcttccagttcagcaacatggcattcactatcaatgaggttgttctctgttgcttccagctcaacacgcagcttcactaccgttagcgcaatatcctcgttctcctgatcgcggagtttgatgtattgctggtttctttcccgttcatccagcagtgccagcacagtaacaggattggctgcggcgatgaattcagcattggcctgctgttccatttggaaatcttcatcgaaaccgctttcaggatgcactccttcaattctgcaaatgggaagatatccaacaacgtcacgatgaattagcgcatcatcacaatcaaatcggctctctccatattctagcgaccacacaccacacgttgctttctctgccttttcacgcagtgcctgataatcaatctggctcactggttgcctcctttgcgccacatcgcattcagatatttgttttgattcactgacggaaaagaatttctcttaagtaattcctctctcgatggcattggctttacgcgttggcgaataatcatttctgccggaagaatgccgggattgtatgcaagtcctctcatggtaaattcctcagtcattactgatagcgccatagcgtgagcggtaattacgcaggcgcgggtcaatttcatggaagtgggtatatgtggctttgcggaatggtcggattgatgtctggtaaattcgctcgcgttcttctttctctgcaagccatatacaatggcgaaattccttttcctctttcgtttcctgcggtagcgacattatcctgtcgtagtttttcctgaatttatccagcacctccgatacggaattgccggaacagcggcgcgcgtcgtccgcaccatacagaggcgctggcataatgggagccttattttaagtaatcagaaaggagggtaatcgttctggctgtaaccataatcatctgcatgattctggcttacgtttttagagcgattgtctttatctttgaggctggcaaccatgttggcgatagtttctggttgcttgccttccgccttttctttaagggtttgacctgtttgtgcaataaacgggatgcgtatttccatctggtagctgtctgcgccagtctttttgtttgtggttaatactttctggagcactaacccgattttctttccatgaaattcaggagcaacaaatttactggcggaaaccatatgttgcgttaattgtccaatcccggcacaccccatcatggcgtggacgacatttgcgccaaatttattttccgttccgtcatttttctgaacacagacgctaagatattggattttacgtccgtcgtcggattcgccagaaaactcaataaatttggctcctttttctgattgctttagttctgcttcagtaatggtaatgatatgagcgccagtttcgttaataaaaccaccttgccctgcggtcagtgctgcttcttcgttataagtaaaaatcacgttgttcatgctgcgttttccttaatttgatgaacattattgatgccgtagtaatcacaaacagtggcatcgacgaaagagagatcgttatcaatctcattggagtcaaacattcccattggggatttaacagtgtctgcaccgttgttttttgtggtgaaaaagaactggtcatcacgggtaagggtgcgaagaactatagtaaacatgccttcgacagtgattttctcgtccagcattttgccgatagttttcattttcacgcgccccataggggtttcttcggtgtgtgcaagaaaatagactctcaggtcatcaggtgcatcctgtgcagccttaatcacctcccatgcgtggcggcctatctcagtaaatttatcaaacgatttttcttctgagcggcgcataaactcattgctcatcacatactggaagtcatcaacaataacgattcttttcccgtattcgtgagcacgcttaattacggcaactattacgtcccatttgtcagtggtaactacggttcctttttttgctctggcatcccatgcaagccagtcttttgatttaaatggtagcggcttgcctattggttttataagtattgcttcctctggattgatatttctcatgctggttgattttccggtgccagattcaccgagtattaatgtcgcagttcccataatttgcctcagaatggtaattcggatgggacggaaagaaattcgcgctcattcatgcgctctctttgagcctgccataaacaaagttgtttctttgatttatctcccgctttacgccagtaacgagcctcagcaatgtgatattctctttttaatcgacttaattctggagttttcgccagttctaccggaatcattttgacctccattttctgtaggcttcgatggcctcacgaaacatcttttcatcgccaataaaagtggcgatagtgaatttagtctggatagccataagtgtttgatccattttttgggactcctggctgattaagtacgtcgatgagtcgtttccatccgtcacgtaatttgcgggtgattcgttcaagtaaagattcggaagggcagccagcaacaggccaccctgcaatggcatattgcatggtgtgctccttatttatacataacgaaaacgcctcgagtgaagcgttattggtatgcatataaaaaggccctcacactggagggcaaagaagatttccaataatcagaacaagtcggctcctgtttagttacgagcgacattgctccgtgtattcactcgttggaatgaatacacagtgcagtgtttattcgtatgcctgtcttttaaccacatcaggctcggtggttctcgtgtacccctacagcgagaaatcggataaactctattcaccccctacagagagaatgatggagattcaccgatgagtaactggtggcaggaactattacgtttcttcctgcgtggtcttacgctacaacagttaattcatatgcttattattttaattgccttgataataatcacccctgcatcaattaaagagtgggtagatataaggaacccagaaatacttccagatcactggatgtattacgcaatgcttttgtgtatcagttatgttctgaacagggtgatggagtttatatttctggcatcttcagacagatataaaaaatatctcagtaagagagatgaggctaaagtaattgtggagactgagcgctgagagatcccctcataatttccccaaagcgtaaccatgtgtgaataaattttgagctagtagggttgcagccacgagtaagtcttcccttgttattgtgtagccagaatgccgcaaaacttccatgcctaagcgaactgttgagagtacgtttcgatttctgactgtgttagcctggaagtgcttgtcccaaccttgtttctgagcatgaacgcccgcaagccaacatgttagttgaagcatcagggcgattagcagcatgatatcaaaacgctctgagctgctcgttcggctatggcgtaggcctagtccgtaggcaggacttttcaagtctcggaaggtttcttcaatctgcattcgcttcgaatagatattaacaagttgtttgggtgttcgaatttcaacaggtaagttagttgctagaacccatggctcctttgccgacgctgagtagattttaggtgacgggtggtgacaatgagtccgtgtcgagcgctgattttttcggcctttagagcgagatttatacaatagaatttggcatgagattggattgcttttagtcagcctcttatagcctaaagtctttgagtgactagatgacatatcatgtaagttgctgataggtttccagttttccgctcctaggtctgcatattgtacttttcctcttactcgacttaaccagtaccaacccagcttctcaacggatttataccatggcactttaaagccagcatcactgacaatgagcggtgtggtgttactcggtagaatgctcgcaaggtcggctagaaattggtcatgagctttctttgaacattgctctgaaagcgggaacgctttctcataaagagtaacagaacgaccgtgtagtgcgactgaagctcgcaataccataagtcgtttttgctcacgaatatcagaccagtcaacaagtacaatgggcatcgtattgcccgaacagataaagctagcatgccaacggtatacagcgagtcgctctttgtggaggtgacgattacctaacaatcggtcgattcgtttgatgttatgttttgttctcgctttggttggcaggttacggccaagttcggtaagagtgagagttttacagtcaagtaatgcgtggcaagccaacgttaagctgttgagtcgttttaagtgtaattcggggcagaattggtaaagagagtcgtgtaaaatatcgagttcgcacatcttgttgtctgattattgatttttcgcgaaaccatttgatcatatgacaagatgtgtatccaccttaacttaatgatttttaccaaaatcattaggggattcatcaggactgagcgcctgttcaattctctgagtattcaggaaaaagaggttttagcatttgctgttatggcaaataacaaaatcgtacttaagcacggcgatccggtcgctttatctcttatgagaaaaggccttctccatcgctcaggtgtgacttacagcgcgtcaggtaaagagaaatttgttatacctgacgtctggttccatgagtgttatatgcgctttgctggtaaagctgatgagctaatttagttcctcgacggcgggggatcgtcacctcgccgtcagttgttttgatttccggtagcctgccgcgtaaatagctacgttcggaagacaagttgaaccttcatattttctggtcaacgttgtcagtgttattacttctgctctcattgctggtttgcgcttgcattgcaagaccactcgtgagggggttggcctgtgtagcttgtcggagctaatcgactcctgactttgcagatttgcgcgacgagctctacggcgagaagctgcggtgcctttaaattctgtttttctggacatagattcctcccgaataaactctggcgatgcaatcccgaagctactcctgagagggttgcttcggcattgcatcccacagcttatgtggttgggtgatctggcttttcagccacgtagtcgagtgttcgacgttgtttaaagagcctgccagtctgttccgtttggcttacagcgtcctgctgatgagttaactttatcgaaatgataaattaatggcaatagcaaaatgataaattgttttagttttcaaatatcctgttgattattatggttttttatttgattgcaggaatttatcagaaggaataaagagacttgagggggatcagaattgcgcgttttagtgagttgtatctgtttatttttcaacaaatacaatcgattatgtgtttttaggtgggcgaacgttgggcaaagaaaacccggcactgaggccgggtgtgtattagggggttgagactccagagagcaatccgtagattttatctacagcaaatgctaatgctggcaagccaagggcccatttgattatatcaagcttaacatcactaagcttaccttctaactttgcctcttgaacagaaagagctgcatcgatcttttttgattgggagtcaagggcactctcaattctactcgattgtatgtccagacgactgttgatttgttcgtgctgagtaacaactaaatgcttcatctcctttatatctgaagccattagttcacgccatttggccatatcagcctgcatttttgaggccactgcatccacttcagctttatttgccttcagaagtgcctgtatttcgtttctgctcaaatcggacattgcggttccctgtataggagtttcctcgtacggtgggataacattagattgtcctttacaatcggcaacccctcctttatctacgattgtagcagttagctgggaattggtcgcatcatccaccatgttttttggtgaataagaggaaataggcgtagaaaacagattaccttttgctgtttccatgaacatcatgaaatcgcgagtattaacgttattcagggaaacttgcagtggtttaacaatacttgatgttttgtaagtaatagttaaatcacctacttcttccggttgttgcattacgacttcgctccattagagttttgtgcctctaattgttcgaaaagaagaactatattctcctgaagagcctttagttgtgccattggcattatcacagtgcattgctgattgagttcatttacagagcctatctgcatattcgctctacctggttgatctggtatatcattttgggatagtaccgcaggtattgacttgtttgcgataaaatgtatacaaatgagatttttttccgctcccggtagtggagcaaaactagcgaagtccgcataggtttcaatataatccacagatggtttaattttgaccggttccataacgcctctcatcaaatattgtaggttttttaattcaatgtgttaaatgttggtggtgtgttatttaaagttattttgacatcctccacgccctgaaggacggggcttgtcacgtacttgaagtcacaaacttttcagccactcccttgcctcgatgtcatccagatgacgagattgcttcagaataccagccacatactccacctttgctacttgatgataaggtaacgttattggcctgtggtcctggttgatgcttgtaaattggtattctccatctctgtcatagccaagaatcttgatcatgttgtgtccttcaacggttctgacaaacacctcatcccccgggaatactttggtgttaggctcaatgagtacatattctcctgattttattctgggccacatgctgtctcctttcacacgaagaccaaaggcatctggatcatcactataaatcttgagccacccatcgcgctcttcggtcatctcgatggcaccatcaacaccaagaattgcctcaccaaccacgcgcactaacccttttcttacctgaccgacaaaagttaaagaatctgagcatgatgcaattggtgttacatcatgtaccaaatcaagccacccattaggtaacccaagtgcggcttcgaattttcttgctagtttatcccctatgtttcgagtgcttttttcaccggagacttgcgtgagttgagaagggctaactccaagcttatcggcaaagcttgcattagtgttacccgcgatttttttatgctcatctagcaaaaacgccagattcgatttgcgaatatctttgttttccatcccacgattctccctctatttagtaaatggataaatacgcattttgataaatctccattgcagtttatttatcaagatggtaaagttgctctgtgtgataaacggaggcactaatgagtaatgaactactacgctggcgaaaagaggcttctagtgaggaatggaagcgactcgccgcattagcgaatacttcagttggctatcttgatcagattgcatatgggtttcgaagagcttccccagataaagcgaatgcaatcgaagaagccactcgtaatttcacgggttataaacctgtgaaaaaggaaaatctggtgttcgtatcgcgtagagcatcagcagcataagtaacctcgctctttgtaacaacggacattcgtcctacgtcgctgaaaagcgaatcccagaatatctgaccaaccaaggccatatgcgtttccacgcatacctttcaactagctattcactattggaaatcataagaaatggaacaaacaagttacagcaaactatcacagcgcgacgttgatcgcgcagaaacagatttactcatcaacctgtcaacgcttacccagcgcggtctggcaaagatgattggctgtcatgaatcgaagataagcagaacggactggagatttattgcttcggtcctgtgtgcttttggaatggcatcagacatcagtccgattagcagggcttttaagtatgcgcttgatggactcaccaataaaaaacgcccggtgtgcaagatcgagcgttctgatcaaatacaaatggaattttaacaacatccaacgaggtaattatatgcgaaacaaaggctttaatccacctgatacacacaaagaagctaagcgtttgcgcttccttcgttccattgatgaaagaactcaaatctcttttgtgaaagttgccagaactgagcttctgaaggctgaggcgagggcgttgctcccgtctctaccaaaagaggagggatatacgttcattccaaacgcatttctggaaaagctgctcaaagaagacatatccgtaagtcagtttaacgatgttcttaaggtctttcgtcaaggcaggtagttatgagcaatacagcaaaaatctacgatttcagcgccgcacacgagcgcaggagcaacaggatggagaaccagaaaactggttacattccgttgtaccggagcattctgaaacagtcatgggcgaaagatgtttatcttcgcaccctgtgggaaaaccttctcctgaatgccgccagaaagccacacaaagcgaatttcaaaggtcatgaatggcatctgcaacccggtcaactggttgtgacagcagctgatttaggtcttcagttatgcgacaggcatggcaagccggcaagccgtgatcaggttgagcggatgcttcaggtttttgtgaaagaggggatgatcaccattgatggagagaagcaaaaaggtcgtgtgatcaccatcacgaattaccatgaatatgctcaaaaaatggacaattcacccgcacatgaagccgcacaaacaaccgcacatgacgccgcacatgacgaagccagtaatggcgcggctttcagcgtacatgccgcacatgaaagcgcacatgaagccgcacaaacaaccgcacatcatgaacaagaaggtattaacaagaatataaataatacccccctaccccccaatgggggaggcgatgggcaggttaaacctgaacgtcgcaaggcagaacgaatcgactatgaatccttcctgaatgcctacaacaccgaagtcggtgacagactgccacacgctgttgcggtcaacgagaaacgcaaacgtcgcctgaagaaaatcattccgcaactgaaaacgccaaacgtggacggtttcagagcgtatgtcagggcgtttgtgcatcaggccaagccgttttacttcggagacaacgacacgggctggacggcagattttgattacctgctgagggaagattcgttaacgggagtacgggaagggaagtttgcagacagggggattgcatgagacaggatatcgaagcgagcgttatcggtggcctgctgattggtggattaactccaaccgccagtgacgttctggcaacgcttgagccggaagcgttttcaattccgctctacaggaaagccttcgaggttatccgcaagcaggcgagaaacagaaacctaatcgatgcgctgatggttgccgaggcgtgcggagaggagcatttcacgtcaatcctgatgaccagcaaaaactgcccgagtgccgcaaacctgaagggatatgccggaatggtcgcggataactatcaccgccgtctggtgctggaaatcatggatgaaatgcgtgaaccaattcagagcggaaccatcgacgcatcgagtcaggcgatggatgagcttgtaaagcgtctctcagccatcagaaagccccgtgacgaggttaaacctgtacggttaggggaaatcatcaccgactacactgacacgcttgacaggcgtctgaggaacggagaagggtcagataccctgaagaccggaatcgaagaacttgacgccatcaccggagggatgaacgcagaagacctggtgattatcgctgctcgtcctggtatggggaaaaccgagctggcgctgaagattgccgaaggcgttgcaagccgcgttattccaggttctgacgttcggcgcggagtattgattttctcaatggaaatgagcgcattgcagattgcagagcgaagcattgccaacgccgggaggatgtcggttagcgtactgcgaaatcctgcatcgatggatgacgaaggctgggcgcgtgttgctaacggcatgagtcagcttgcagatttggatgtatgggtagtcgatgcctcgcggttatcggtcgaagaaatacgctcaatcgcagaacggcacaaacaggaaaatccaaacctctcactcatcatggcggattatcttggcctgattgagaagccgaaagcagaccgcaacgacctcgcaattgctcacatctccggaagcctgaaggcgatggcgaaagacctgaaaacgcctgttatctccctgagtcagctttctcgcgatgttgagaagcgaccaaacaaacgcccgacaaacgcagatttgcgtgattcaggaagcattgagcaggacgcagactcaatcatcatgctctatcgggaagcggtgtatgacgagaacagtagcgccgcgccatttgctgaaatcatcgtgacgaaaaaccgttttggctcacttggtacggtttaccagcggttctgtaacggacactttgaaccgccccggaaatcctggagactaaactccctgagaaagaggtaaacaggatgactaaaaatactcgtttttcccccgaagtccgtcagcgggcgattcgtatggttctggaaagtcaggatgaatatgactcacagtgggcggcaatttgttccattgccccaaagattggctgtacgccggagactctgcgtgtctgggttcgccagcatgagcgggataccgggggcggtgatggtgggctcaccagcgctgaacgtcagcgtctgaaagagctggaacgtgaaaatcgtgaactgcgccgcagtaacgatatccttcgccaggcttccgcttattttgcgaaggcggagttcgaccgcctctggaaaaaatgatgccactgctggataagctgcgtgagcagtacggggtcggaccggtatgcagcgaactgcatattgccccgtcaacgtattaccattgtcagcaacagcgacatcatccggataaacgcagtgcccgtgcgcagcacgacgactggctgaagagagagatacagcgcgtatacgatgaaaatcatcaggtgtacggtgtgcgtaaagtctggcgtcagttgttacgggaaggaatcagggtggccagatgtacagtggcacgtctcatggcggttatgggacttgccggtgttctccggggtaaaaaggtccgtacgaccatcagccggaaagccgttgccgcaggcgaccgcgtaaaccgtcagttcgtggcagaacgacctgaccagctgtgggtggctgattttacttacgtcagcacatggcagggcttcgtctatgtggcgtttatcattgatgtgtttgccggatacatcgtggggtggcgggtctcatcgtctatggaaacgacattcgtgctggatgcgctggagcaggcgttgtgggcccgtcgtccgtctggcaccatccatcacagcgataaaggctctcagtatgtgtcactggcctatacggagcgactaaaagaagccggattactggcatcaacagggagtacaggcgactcgtatgacaacgcgatggctgagagcatcaatggtctttacaaagcggaggtaatacaccgtaagagctggaaaaaccgtgcagaagtggaactggccacactaacgtgggtggactggtataacaatcgacgattgctgggaaggctgggccatactcctccggcagaagcagaaaaagcttattatgcttccatcggaaacaatgatctggcagcctgagttcacagataaaacactctccaggaaacccggggcggttcactttgttgcatgtgaccaggatgaagccagacagatttgcacagcatcaaatgcgcctgctgcgcgtggcagacgatatgcacaaggggcggacgtatgaccatctacatcactgagctaataacaggggctatttacacagtagcccttttttattggattaagaacgagggggatcctgatggacaccgttaacggaatgtgttcagacgcaccgcgtgccaaaaaatgtaagtgcggaaaatcaccgacaatattcgacatggagaacgggtgccaaatctactgcgctaaccacgctgctgtggcggccgcgaattatcgcagtgcggtaacggagtggaataacctgaaatctgttagagagggaagtcatgaaaaaactaacctttgaaattcgatccccagcacatcagcaaaacgctattcacgcggtacagaaaattcttccagacccaaccaaaccaatcgtagtaaccattcaggaacgcaaccgcagcattcggcaaaatgcacgccttcacgcgatgctatctgaaataagtaagaaggctacatatcatgggaaagcaagaaatattgagttttggaaggggttattcgtttctggttggcagattgcaaccaaccagcaccctgagattatatcagggttagaaggtgagctaataaacatcagagagagtacggcgactctatctgtaaaaaaaatatccgaaataatggactacatagaagcatattgtgccatgaactcaattcatcttagcgaatggaggaattatgattgaggtttgggtagatatcgaaggaattccattttatcaggttagcaataaaggaaatttcaggtctattacgagggaaattacagtaacatcaaccagacagaggccatataagaaaataattaatggcactagcgtaaaaccattcaagtgcaagtcgacaggatatcttcaaataaaggtatacggtaagaaatacagcgcccacaggatagttgcgaaagcattctgtacagggttctgtgatggcttggtagttaatcacaaaaatgggcaaagagatgacaatagggctgaaaaccttgagtgggtatcacattctgaaaactcaaagcacggatataaacaaaatggaagaatacctatatcgctaggtaaatttagtggtgatcatcctgccagtaaagctgttatttctactgacatgaaaactggggaggaggtttattatgaagcagctatggatgctgtcagagaaggatttgatagttcgtcaattagtcgttgctgtaatggcgaaagctcatatcacaaaggaagattctggcgatttgcaaatgaaacaatgaaagcgcgatggggagatcgggccgcatgactatcaaatcaaatacgccagcacacgacaaggactgctggcaaacgccgctttggctttttgatgcactggatattgagtttggattctggctggattcggcagcgagcgacaaaaatgctttatgcgctcactggctaactgaggccgacgacgcgctcaattctgagtgggtaagccacggtgcaatctggaataacccaccgtacagcaatatcaggccgtgggtggaaaaagccgctgagcagtgcatacaacagcgacagacggtagttatgcttgtgccagaggatatgtcagtcggatggttcagcaaggctctggagagtgtcgacgaagttcgcattatcactgatggacggattaattttatcgaaccatcgacagggctggagaagaagggaaacagcaaaggctccatgctgctgatttggcgaccgttcatcagtcctcgacggatgtttactaccgtatccaaagcggcattgatggcaatcgggcagggcgtcaggagggcggcatgaggcgacagcgacgaagtttcaccgacatcatctgcgaaaactgcaaataccttccaacgaaacgctccagaaataaacgcaagccaatcccgaaagaatctgacgtaaaaaccttcaactacacggctcacctgtgggatatccggtggctaagacatcgtgcgaggaaatgacaatggattattcacagttaagtgattttgaaattaacgtggcggtattcgaagccattcataacggatcaccggattacaaagaaggtgagaatggcgatatggtgtttgtctcatttgagggagacattgtaaacggagacgcagttgaagtagaagttgagcgcggatcctttaacccatgcgcaaacccagcagactcatggccgattattgaaaaatacaggattagcattatcaatctcgatgaagacgagtggggtgcacgcggtgtggcctactgtaaatctaagcgagctatacatgaaaatcccctccgcgccgccatgattgtctttctcatgatgcaggacgccaataatgcttagcccatcccaatccattcaataccagaaagaaagcgtcgagcgggctttaacgtgcgctaactgcggtcagaagctgcatgtgctggaagttcacgtgtgctccgattgctgcgcagaactgatgagcgatccgaatagctcaatgtacgaggaagaagacgatggctaaaccagcgcgaagacgatgtaaccgtaaaagagaagatttaactgttaaaaggatatttgagttactaagtttcgataaatctaccggtgtatttagatggaaagttcccactcagggaaggatagcattaaatagtgttgctggaacttttgattccaacggttattcaatgatcatgattgatgggcgtagatataaaactcacgtcttagttttttacataactcataatcgttggcctgctggtcaaattgaccacgttaatggaattaggaccgacaataggccagaaaatttaagagaatgcctgccaatagaaaattcaagaaatataaggatccgaaagaatagcaaatcaggttgcagaggagttacttggcacaaacgacagaaaaaatggaatgttaggctaggtttccatggcaagagtaaacacttcggatgctttgatgatctggagttagcggtactagttgctgaagaagcccgagataagtattacggtgatttttccggcaacgaaaggagcacttatgcgaatctatcgaaggaaatgtaaatgttgcaatgaatggtttataccaaaatatcaaaatcaatattggtgtaatgagatttgtggaacaaagatagcactcgaacgacgaagcaaagaacgcgaaaaagcggaaaaagcagcagagaagaaactacgacgagaggagcagaaacagaaagataaactgaagattcgaaaactcgccttaaagccccgcagttactggattaaacaagcccaacaagccgtaaacgccttcatcagagaaagagaccgcgacttaccatgtatctcgtgcggaacgctcacgtctgctcagtgggatgccggacattaccggacaactgctgcggcacctcaactccgatttgatgaacgcaatattcacaagcaatgcgtggtgtgcaaccagcacaaaagcggaaatctcgttccgtatcgcgtcgaactgattaatcgcatcgggcaggaagcagtagacgaaatcgaatcaaaccataaccgccatcgctggactgtcgaagagtgcagggccatcaaggcggagtatcaacagaaacttaaaaaactgcgaaacagcagaagtgaggctgcatgaatatctacgaaagaattgatggcagcaaataccgaaatatttgggtagttggcgatctgcacggatgctacacgaacctgatgaaaaaactggagacgataggattcgacaccaaaaaagacctgcttatctcggtgggcgatttggttgatcgcggtacagagaacgtcgaatgtctggaattaatcacattcccctggttcagagctgtacgtggaaaccatgagcaaatgatgattgatggcttatcagagcgtggaaacgtcaatcactggctgcttaatggcggtggctggttctttaatctcgattacgacaaagaaattctggctaaagctcttgcccataaagcagaagaacttccgttaatcatcgaactggtgagcaaagataaaaaatatgttatctgccacgccgattatccctttgacgaatacgagtttggaaagccagttgatcatcagcaggtaatctggaaccgcaaacgaatcagcaactcacaagacgggatcgtgaaagaaattaaaggcgcggacacgttcatctttggtcatacgccagcagtgaaaccactcaaatttgccaaccagatgtatatcgataccggcgcagtgttctgcggaaacctcacattgattcaggtacagggagaaggcgcatgagactcgaaagcgtagctaaatttcattcgccaaaaagcccgatgatgagcgactcaccacgggctacggcttctgactctctttccggtactgatgtgatggctgctatggggatggcgcaatcacaagccggattcggaatggctgcattctgcggtaagcatgaactcagccagaacgacaaacaaaaggctatcaactatctgatgcaatttgcacacaaggtatcggggaaataccgtggtgtggcaaagcttgaaggaaatactaaggcaaaggtactgcaagtgctcgcaacattcgcttatgcggattattgccgtagtgccgcgacgccgggggcaagatgcagagattgccacggtacaggccgcgcggttgatatagcaaaaacagagcagtgggggagagttgttgagaaagagtgcggaagatgcaaaggtgtcggctattcaaggatgccagcaagcgccgcatatcgcgctgtaacgatgctaatcccaaaccttactcaacccacctggtcacgcactgttaagccgctgtatgacgctctggtggtgcaatgccacaaggaagagtcaatcgcagacaatatcttgaatgcggtcacacgttagcagcatgattgccacggatggcaacatattaacggcatgatattgactttttgaataaagttgggtaaatttgacccaacgatgggttaattcgctcgttgtggtagtgagataaaaagaggcggcgcttactaccgattccgcctagttggccacttcgacgtatcgtctggaactccaaccatcgcaggctgagaggtctgcaaaatgcaatcccgaaacagttcgcaggtaatagttagagcctgcataacggtttcgggattttttatatctgtgcaacaggtaagagcattctcccttatggggcttggcttaaatgcaccgagtgctcttatcgttgtgctgaattaagcgaatgccggaagcagaaccggatcaccaaatgcgtacaggcgtcatcgccgcccagcaacagcacaacctaaactgagccgtagccactggctatcctgaattcatcagtgatagttacgctgcggccttctacacatgaccttcgtgaaagcgggtggcaggaggttgcgctaacaacctcatgccgttttgcccgtgcatatcggtcacgaacaaatctgattactaaacacagtagcctggatttgttctatcagtaaccgaccttattcctaattaaatagagcaaatccccttattgggggtaagacatgaagatgccagaaaaacatgacctgttagccgccattctcgcggcaaaggaacaaggcatcggggcaatccttgcgtttgcaatggcgtaccttcgcggcagatataatggcggtgcgtttacaaaaacagtaatcgacgcaacgatgtgcgccattatcgcctggttcattcgtgaccttctcgacttcgccggactaagtagcaatctcgcttatataacgagcgtgttcatcggctacatcggtactgactcgattggttcgcttatcaaacgcttcgctgctaaaaaagccggagtagaagatggtggaaatcaataatcaacgtaaggcgttcctcgatatgctggcgtggtcagaggggactgatagcggacgtcagaaaaccagaaatcatggttatgacgtcattgtaggcggagagctattcactgattactcagatcaccctcgcaaacttgtcacgctaaaccccaaactcaaatcaacagctgcaggccgttaccagcttctttcccgttggtgggatgcctatcgtaagcagcttggcctgaaagatttctctccgaaaagccaggacgctgtggcactgcaacagattaaagagcgtggcgctttaccgatgattgatcgcggtgatatccgtcaggctatcgaccgttgcagcaatatctgggcttcactgccgggcgctggttatggtcagttcgagcataaggctgacaacctgattgcaaaattcaaagaagcaggcggaacggtcagagagattgaggtatgagcagagtaaccgcgattatctccgctctggttatctgcatcatcgtctgcctgtcatgggctgttaatcattaccgtgataacgccatgacctacaaagagcagcgcgataaagccacatccatcatcgctgacatgcagaagcgtcaacgtgatgtagcagaacttgacgccagatacacaaaggagcttgctgatgctaacgcgactatcgaaaatctccgtgctgatgtttctgctggtcgtaagcgcctgcaagtcgccgccatctgtgcaaagtcaacgaccggagccagcagcatgggcgatggagaaagcccaagacttacagcagatgctgaactcaattattaccgtctccgaagtggaatcgacaggataaccgcgcaggttaactacctgcaggagtacatcaggacgcaatgccttcgatgatagcgataattttactcatcatccttcacatctggctctgtagacagggtgatgatcacttctggagtgaatccagattaaacatctcattgctgatgcttgatattgagcatctggcgcgcggtaaggggctgcgttgagataagagccagtcatcaaaaacaccaggatttagcctcgcattcgcggggcttttttacatctgcagtaaacagcgcatcgcagcgcgtaacaatcccgagtctttcagaaagctgagcctgagaactgccgtatatggtggcgaccatctcggggcggcttttctgtgcgaacaggctcatctttctaaaaggtaagacgctatgaatatcgttccactgaattacaaaggcgaacctatccgcttcaatacggatggctggattaatgccactgatattgcaaaacgtttcgggaagcgtctggatcactggttgtccaacgctgaaactctcgaatacgttagagctctggatgaggtttattcaggtgaaccatcgaaaattctacatacccgtgattccgggtatgtaaaaacaagcaaggcacgaaaggacaggggaggcggaacatggctgcacccaaagttatcagttgcctttgcaagatggtgcgatccgaaattctccgtatggtgcgacctgcacattgatagtctgcttcgcggtgaactgactgagcagcagaaatatgagcaagcatgtcgcattcgcgatgaccggaaatcaaaagccagcaatggggcaagagagatggctcgctggcgatgggataagccggttattgaagcaaatgtcgagtactggcgcgagcaactgcagctgactctcgatatcgcgtgctgatggcaaacgcaaaactgcgttatcggaaaaatcaaagcattacgagaactgagcaacagctatccattacaaagcccatctacgggtgggcttgataatgaaaccggaatttattctgggaaaccagttacggcagtacagcgaaacaacccaagccagtaagtggggaaataacactggcagccactgaaagatgaacctcctgccttatggcaaaaaagattctttgtggtggcggactgatggaaagacatcggttattgcagagaccattcaatgagtggtctcgacaatggcttataccctacacgggataacttaactgatatcccttttaacggataaacggagccaacaatggcagagattattcccatgactgaagaacagaaattccagctagagatttacaaactggtcatgaaccagaacgcagccgcagaagaagcatttcagttcattggcactgacgagctgaagcttgagctattcaaaattcacttccagtcaggcggcgctaattcagatatcacgacccgcacaatcgaagcggtgcgtaaatcgaaggaagcgttagacctgttcactaccggagcataaacatggcaactcaaggtttcgacaacccatccaaattccgcgatgaatgggataagcaagcagaagggaaataatcaatatggcagcaccaaagggcaaccgattttgggaggcccgcagtagtcatgggcgaaatcctaaattcgaatcgcctgaggcgctgtgggctgcttgttgtgaatacttcgagtgggctgatgataacccgctatgggagggtaaggtattttcatatcagggagaaataattgaggctaatgtccctaagatgcgagccatgactatttcaggattgtgtaccttccttgatatcaccaggcaaacatggggaaccttccggtcaatggaaggtttttctgacgtcacatcacgagcggaagacatcatctacgaccagaaattctctggcgcagccgctgaccttctcaacgctaacatcatcgcccgtgatttgggcctcaaagagcagtcgcaagttgaagacgtgacacctgataagggagatcgcgataagcggcgctctcgtatcaaggagctattcaaccgtggaactggacgcgattcttgataacttgagcgacgaagagcaaatcgaattgctcgagctactcgaagaagaagagaactaccgtaacacacacctgctatatgaatttacgccatacagcaaacagcgtgagttcatcgacgccgggcatgactatccagagcgatgttttatggctggtaaccagcttggtaagtcatttactggtgctgctgaagtcgcgtttcaccttaccgggcgttacccgggcacaaaaggctatcctgctgatggtaaatatggcggtgagtggaaaggtaagcgtttctatgagcctgttgtcttctggattggcggcgagacaaacgagactgtaaccaaaacgactcaacgcatcctgtgtggtcgtatcgaagagaatgatgagccaggctacggttccatacctaaagaagacatcattagctggaagaagtctcctttctttccgaaccttgttgatcatcttctggttaagcatcacacggctgatggcgttgaagatggcatttcaatctgctacttcaaaccatactcgcaaggccgcgctcgctggcagggtgacacaatccacggcgtgtggtttgacgaagagccaccatacagcatttatggcgaaggtcttacccgtaccaacaaatacgggcaattctcaattctgacgtttaccccgctgatggggatgtctgacgttgttaccaagttcctgaagaatcccagcaagtcgcagaaagtggtcaacatgaccatctatgacgctgagcactacacagacgaacagaaagagcaaatcatcgcatcctatcccgagcatgagagagaggcgcgtgctcgcggtattcctacgatgggtagcggtcgaatcttccagataccggaagagacgattaagtgtcagccgttcgagtgtcctgatcacttctacgtcatcaatgcaatggacttcggatgggatcacccacaggcacatatccagctttggtgggataaagacgagggcgtgatttatctttctcgcgtctggaaggccaaacagaagaaggcgacagaggcatggagtgctgttaaagcatggagcaaaaacacccctacggcttggcctcatgacgggcatcagcacgaaaagggaggcggcgctcagctcaaggaacaatacgccgaagctgggttcgacatgttgccagatcatgcaacatggcctgatggaggtaatgcggtcgaacccgggatagcagagatacgcgacatgatgctcgacggtcgtttcaaggtatttaacacctgcgagccattctttgaagagtttcgtctgtatcaccgcgatgagaacgggaagatcgtcaagctaaatgacgacatcctttctgctgttcgctatggctacatgatgaggcgttttgcaatacagatgcgagacatcaaagatcctaaagagattgattactcaagctacaacataccttgcggagttggatgatggctgatgatagaaagatgactgactggcatcgcaaggtgctgtgcaactttgataatgcctggtcagcaacgcaggatatgcgtgagcagattattgaggctcaacgtttcgtccgggtatccggcgcacagtgggaaggcagcacaaacgctggttactcatttgatgaaggcaggtttgagcattacccgcgctttgaactgaataagattgcccgtgaatgtgatcgcatcattggcgagtatcgacagaatcgcatcagcgttaaattcaggccgaaggatgacaaggcatcggaagcgttagccgaaaagatgaacggcaaattccgcgctgattatcaggaaacatccggtggcgaagcgtgtgataacgcatttgatgatgctgtaacgggcggattcggttgtttccgcatgtgtgctgattacgaagatgaaatggatccgagtaacgagcagcgacgcatcagccttcttcctgtttacgacccggcgacatgcgtcttcttcgatcaggacagcaagcaatatgaccgctctgatgccatgtgggctatggaaatgttctccatgacgcctaaagcgttcgaggctgaataccctgattccatcgcggcaagcctttctcgtgatgacactggtactcagtatgactggtcaacgcctgatgccatctatgttggacgctactacgaagtccgcatagagaaggtgaagctcacagcatggcgtaaccctgtcagcggagaaacggcaatctatgatgaagagcaaatcaaagatattgtcgacgagctgaccgatggtgcattcgaactgattggcgagcgaacggtgaagaaacgccgagtttattgcggtcttctgtctggcgctgaatggctggaagaaccgaagcgtattccgggcgaacatattcctctcatcccggtatatgggcgtcgttcatttgttgataatcaggagcgaatcgaaggccacgcagcaaaagcgatggatgcacagcgtcttgagaacctgatggtttccatgattgcagataacgctactcaggctggcggcgatggcattcctgtagttgatgttgacatgattcctggtcatcttgccactcattgggcggagcgcaacaaaaagcgcccggcgttcctgccgatggtcagtttgaaaaacaaaaacggagatattactgcgcaggctcaggtcagcagttatacgccttcgacacaaatgcctccagctcttgccgggctattgcagtacaccggaacggctattcagcaaattacaggtgcgtcgcagcttgagaacatgccgagcaacgtcgccaccgataccgttgatagcatctttaaccggatggacacgcagtcctatatctacatggacaacatggctaaatccatgcgccgtgctggcgtcgtgtggctttctatggctcgtgaagtctatggcagcgatacgccaatgcgcatcgttaatgaggatggcagcgatgacgtggcgctgatgactggtgaagtggttgaccgtcagacagggaaggttatcgcgcttaacgacctttcgcagggtaactatgaagtgactgtcgatgtcggtcagtcgttcgctactcgccgtgatgcaacggttaagtcgttgctttccatgctggcacttatcccgccaggaacgccgaagcatgaccttgtatcgtcgatgattctcgacaatatggacggcgaagggatggacgaccttaaagaatacaaccgcaatcagttgcttctgtctggcgttattaagccgagaacaccagaagaacagcaaatggttgagcaggcgaaacaacaacaggccagtcagccagatccggctatggttgctgcgcaaggtcagcttcttgctggtcaggctgaattgcagaaagcgcagaacgaacaggcagccattcaggttaaagcattccaggcacagactgatgctcaggttgcagcggcaaatgttgtgaaaatcctcgcatctgccgatagccagcagaaatctgatatccgcgaggctctgaaactgctcggacagttccagcaacagcaaggagacaatgcccgtgctgatgcagagcttgtcctgaaaagtcaggcacagggtcatgcgcagcgcatggacatcagcagcatcctgcaaaaatcaactcagcaacaaccacagcagtaattaacccataacgtgcaatggctgtctttatgaggcctggcaccctattgccttccgatgggctgaacatcgagtaaacaggggtaacaaatggaccagatggcagaaaacacaccagaagttgaaatcgaaaccgacgcgtcagagcagattcctgatgatgtcgaactggctgaagaagtcgaaacagaagatggcagtgagtcctccggcaatgatgcagaggaagctactgaaactgatgacgacgaatcagaacaggaattctactttggtgacgaaaagctggattcgccaaccagcgaagatagcgcagagcatggactggtaaaacacctgcgcaagacgattaaagagaaagaccgcgagctgaaagagctgatgcgtcagtctcagaaacccgtcgagcagcagccggtaataactcaaccaccgcgaatgccaaaactggatgatgaggacatcggtttcgatgaagaaatctaccagcaacgcatggctaagtgggcagaggataacggcaagtaccagcaacaggagatggctcgcaagcagaaggagcaggagcttcaggctgcctatcaagagcgattatccaaatatcagcaacgtgttaaggctctcaaagttcctggctatcaggaagcagaacaggccgtactcgaggaaatccccatcgagacacaaaacgcgatcctgtttgagtcagagaagccggaaatcgttgttctggcgctcggtcgcaacgctgaactgcgcaagcaactggcagaagctaccaaccccgtagcaattggtcgtctgctggaacgtatcgaatcgaaggctagagtcatgccaaaagcaaaaaccacggcagccacaaccccgacagttaaggggagcaacggcgcagtaatcaacaacctcggcaaattgaaagccaaggcgctggaaactggtgactggacgccgtatttcgccgctaaaaaggcaaaaaaataacctatcggagcattaaacatggctaaccaattagcaaaagaccttgaaatcatgttcgaaaactacgttgaaggctttgaggccgcctgcgtagtttcccgtaacgctaaaaaattccgtcccggtgatacagcaatgcagcgagcaggtgatgttctgtatcgtccgcagcattaccacatgaacattgaggaaggcctagacctcagcggcaaaacgccaacagcactggttcagcgccttgttccttctgtgttcaaggagccgaaaaacattctgtacactctggatgcgcgtgaaatgcgtgacccggaacataaaactgaagctggtcgcgccgcaggtatgcgccttgctgcacagattgactctgacctgatttccatggtcacgcagcgtgctactaacgtgatcacaatggctgactcaaccactggttcacagggccgtgatttgtggaactgtgcggcaggtattgatgccaccatgacggcgattggtgtaccacagggtatcaaccgccgctctttctggaaccccttcaactacaaagaccttgctggcgagcttggtcaccgtgcctatgctcagggcgcaaccctgacagcatacgaaaaagcgcagatccctccggttgcgtccttcgatagctacaagaccgatatttctggtcgtgttccgaagggtacagcaacttccattacgctggcagcagcacctgcgcacaaggttgaagcgaaagatgctaacgaaatgccagtggataaccgacaggggaccattacggtatctgctgaaggtttgcaggttggcgatgcgtttaccatcgcaggggtgaattccgtacaccagatcaccaaagataccaccgggcagccgcaggtattccgcgttctggcagttagcggaacgacagtaactatctccccgaaaattctgccgcctgacaacgcggatgtcgccagccgtccatatgcaaacgttgatgctaatgcggcaagtagcgcagcaatcaccattctcaacaaaaatgccgcaccggctaacctgttctgggctgatggttctgttgaactgatgtacggcaaactggcgttcccgactggtcagggtccacaggtaatgacagcaaccaccgagcagggcgctacgctgatcatgtcttacgccttcgaccacatcaaaggcgtaaccactgcgcgtttcaccactctgtacggttgctctgtactggttcctgaatatacgggcatcgttattgccgggcagtaatttaggtggggcttcggccccatttttattgggagaagacaatggcacgaacaatgctctataagccgggcaacatgatcacctgtggtcagtttgctgtcgattacatcattgttgatgacgaagaagttaaatctcacctgaaaaaaggctgggtaaaaactcctgaagaaaccgcaacgaagcaaaaagtggctaaggcggaagaagatggcgaaaacgaagggtgatctcgttcttaaggctttacgaaaagccgggctgtattccaatgccacgttgacagatgctgaccctcaggcaattgaagatgccattaatgacctcgaagacatgatggcagcatggcaggcaaaaggtatcgagcttgggtatcagtttgctgatacagaaaacggcatcatgccgttacctgacgatgattcaggtatccctgcatgggcaaatgatggcgtcgctttgaaactcgctgtgcaagtgtgcatggataacgtcattcagccgtcagacgctctccttaccgctgctgacagtgcatatcagacaatctgtatcgctttaaccaaaataccaccacttgagcggagaaatgacatgcctcgcggtagtggtaacaaaagcgcgtttacgtggaatcggttttacatcgagaaagatgatccgagtacgtgaggtgaataaatgccgattcagcaacttccgcttatgaaaggtgtcggcaaagactttagaaacgccgactatatcgactatctgccagtgaatatgttggctacacccaaagaaatcctgaacagcagcggatatcttcgctcattcccgggcattgccaaacgttctgatgtgaacggcgtatcgcgcggagttgagtacaacatggcgcagagtgctgtttatcgcgtgtgtggcggcaagctgtacaaaggagaaagtgaagtcggtgatgttgccggaagtggtcgtgtatcaatggcgcatggtcggacatctcaggctgtaggcgttaatggccaactggtcgagtatcgttatgatggcacggttaaagcagtctcaaactggcctacagacagcggattcacgcagtatgagttaggttctgttcgtgacattacgcgcttacgcgggcgttatgcgtggtcaaaagacggcactgattcatggtttatcactgaccttgaagacgaatcgcatcctgaccgctacagcgcacaatatcgcgcagaatcgcagccggacggtatcctcggcatcggcacatggcgagacttcatcgtctgctttggttcatcgacgattgaatatttctccctgactggtgcaaccaccgttggtgcagctttgtatgtcgcacagccatcactgatggtgcaaaaaggcatcgccgggacttactgcaaaacgccgtttgctgattcctatgcgtttatcagcaatccggcaacaggtgcgccgtctgtgtatatcatcggctccggtcaggtatcaccaatcgccagcgcgagcattgagaaaatactacgctcctacactgctgatgaactggctgatggcgtgatggagtctctgcgatttgatgcgcatgagctgctgattatccatcttccgcgccatgtcctcgtatacgacgcatcttcaagcgccaatggtccgcaatggtgtgtgctgaaaactggcttgtatgacgatgtgtaccgcgctatcgacttcatttacgaaggcaatcagataacgtgcggagataagctggagttcgtgaccgggaaattgcagttcgatatcagcagccagtacgacaagcaacaggaacacctgctgtttactccgttgttcaaagcagataacgccagagttttcgaccttgaagttgaatcttcaactggcgttgcgcagtacgctgaccgcctgttcctatcggcaaccactgacggcatcaattacggacgtgagcagatgattgagcagaatgaaccgttcgtttacgacaaacgcgttttgtggaagcgagtagggcgcatcaggaaaaatgttggcttcaaattgcgcgttatcacgaagtctcctgtcactctgtctggcgctcagataaggattgagtaatggcggattcgaatctcaatgtgccggtaatcatccaagctacgcggctcgatacatcaatccttccacgcaatatattcagccagtcttacctgctgtatgtcataaatcagggtgctgatgttggcgcaattgccgggaaggcaaatcaggctggtcagggcgcttacgatgctcaggtaaaaaacgatgaacaggacgtcgaactggcagatcacgacgcaagaatcaccgcaaacacaaaagcgataaatctccttgaggtcaggttaacaaccgccgaagggaagatagtcgtactgcgtagcgatgttgattacttgctggatgaggttatcgatattcaggcgcatctggtcactgttgaccaaagactggatggcgtagaaagcgatgtatctgacattaagagtgattacgtatcgaaaaccgtaaccgaatcgcagtctcttgcgtcaccgctggatgtaaaaacatcatattcagttgatggaattcaggttgttggagcaagaaataccggatggactgcagccacaggtacgccacttcttggctcattcaacgctaaccagtcatacactgtcggcactacgtacacgcaatccgaagtcgcagctctcgctacaggtttgcagcaggcgcggcagcgtattctggcgcttgaaacagcacttagattacatgggctgattgactgatgattacattcaaaccaacgcgaaacatcgacctgatcgaagcagtcggaaatcaccctgacattattgccggaagcaacaacggtgatggatacgactacaagcctgaatgccgttactttgaggttaacgtgcacggtcagttcggcggcattgtttactatcaggagattcagccgcttacattcgattgccacgccatgtacctgccagagattcgcggcttcagcaaggaaatcgggatggcgttctggcgatacattctgactaacaccaccgttcagtgcgtcacatcgttcgccgcacgcaaattccgccacgggcagatttactgcgcaatgattggccttaagcgtgtcggaaccatcaagaaatactttaaaggcgtggatgacgtgactttttacagcgccacacgcgaagaactaatcgacttcctgaatcacgggagatagccatgttatatgcatttaagctgggcagaaaactgcgcggcgaggaaccttggcgccctgaaaaaggcgggaaaggtggtagctctgataaaagcgcaaagtatgcagcagaagcccagaagtatgccgcagacctgcaaaatcagcagtggcagacgatcatgaaaaaccttgctccgttcacgcctcttgcggagcagtatgttaaccagcttcagaacctttccagtttagaaggtcaggggcaggcacttaatcagtatcgcaactctcagcagtataaagaccttgcaggtcaggctcgttaccagagtcttgctgctgcggaggcgacgggtggacttggttcgacagccacaagcaatcaactggctacgatcgcgccgacactcggtcagtcttggttatcaaatcagatgagcaattacaacaatctggcaaacgttgggcttggtgcgctgcaaggtcaggcaaacgccgggcagacatacgccaacaacatgagcagcattgcacagcaaagcgcagctcttgccgctgctaatgccaacaaaccatcaagtcttcagacagcaattagtggcggaacgtctggtgcgattgccggtgcaggtcttgccagccttttgggaacatcaacaccttggggcgctggcattggtgctggtatcggattgcttggctcgttgttttaaggggtaatcatggctacttggcaaggatcaaatggcggattattggctggtatcggcggcgtcaactcaaacgctccgaacgtaaatgacatcggcaatacgcttcagtttatcaggcagaacaatgatattgagcgttcaggcgctaacaatgttgggctgactgctttgcaaggcctttcaggtattgcgggggtgtttcagcaggaaaagcaggctcagcggcagaaagaatttcagcaggcatacgctaatgcttatgcgtctggtgatcgcggtgctttgcgtcagttggctactcaatatccagaccagattgaatccgttcgtaaaggcatgggattcattgatgaagaccaacgcaattctatcggcaccttagcggctggcgcacgccttgcggcctcgtctccagaagcaatgcaatcatggctgcaaaacaacgccaatgagctggcgcgcgtcggtgttgaccctaataacgttgctcagatgtatcagcagaatccttcaggatttggtgagtttgttgatcaccttgggatggctgctctcggtccgattgactacttcaatgttcaggacaagatggctggtcgtgagattgaccgaggcaggctggcagagacaatccgcagcaatcaggccggagaagcacttcaggcgagagggcaggatattagccgagcaaatgcgttaacgtcagcatatgcaccaacagccgcaatgcagaattacaatcagtacgcgcaaatgttaaaggcagatccagatggtgcagcggcatttgcggcagcggcgggaattaatcccaatgctaagaaattacttaaggttgaaaccaatcctgatggatcggtaactaagtattacaccgatggcagcgaggaagccggaaaactaaaccaacctatatctggtgatggcattaaaccaattagcttgccacaagcgcaaagcatcatagataaggctaatgagggttccaagaaggcggcaggatttgctttgcgattaaaagattcaatggactcaatgaatcagcttagtaaaagcattgaccctaagcgagttgcattaataaatcgctctcttggtgatgggactattgcaaatttaagcctatcaccagcggagcagcaatatatggtaaatgcgagagacgccttgtatgcaattttgcgcccagaaacaggtgcagcaattactctgccagagatgcaggagtattccaaaatgtacctgcctcagcccggtgattccaaggctgctactgaaacaaaaatgcgaaaaatgcagggccaatataactcattacgtggtcagtctggtcgcgtttatgatgctttggtggtttcaagtgctgcaaatagtcaacaacagagcaatagccaacaaccgacaaatacccaacagcagcagagtcaatccggatcatatacctcaaaatcaggcattcaatttacggtggaatgatgaaagtaactgcaaacggtaagacatttaccttccctgatggtacgagcacggaagatattggcaccgccattgatgagtattttgctggtcaggctgttcagcaacaaacagttaatcaggccaataatgcaccaacacgggaagaaccatcattaatgcaacaagctggcgattggctcactggtggtcaaagtgcagggcaaattgcagaacaggctggtcgtggtctggtaaacataccatttgacgtattgcagggtggcgcaagtctgattaatgcaatcagtcaggggcttggtgggccaaaagtattggatgatgtctatcgtccagtcgatcgaccgacagacccttatgcgcaagctggagaaacaattggcgggtatctcctgccaattggcacagcggcaaaagttgctggagcgccagcaaagctcgcaggagacatcggttccgcaggaaacatgattgcaggttctcttgctgatgctgcaaatcaggagggtgattttgcacaaaatgctgccattaacggtggtatcaatattggtgctcaaggcgttctttcaggtgtcgggcgcgttattgcgccaagggtttcacaggctcttggtggtgcagcactgaattctgctaatgaagtttctaggatggcaaagtcaggtgctgggcgtcagtcaattgccagtcaggccgctaatgtgtccgaagatgtagcaaaagcggctgagtctgctggaattgatataaacgcattaacaccaggaatgcgatctggaagtcgtggaattgcacaagccgaaggcgcattggcatcaacacctggaattgttcaggacgcccatcaggcagcatttaacgaaatatcatcaaagttaagtcgaaaccttgatgaatttggggccacatctggaacggcatcagaaaaaagtgcggctataaaacaaaggattcttcaaaatcttgatcagatgaaggatgccgagcgcgcggcatgggatgacgtgcggtcaacaatgccaaatcaaaaagcaagaatgctaaatggtaatgccgttattcaggcagagcgatctgctggcataccgcttactcctgaaatgaaacagtttgttcaggcaaacaatcaaggtggagtaacatttgatggcatgaaagcatggagagcgaaatttgctgatgcggagcaaaaatataagcgtagcggagaggcaaatgcggcaaggagagcaggggaaatacgccgggcaattactgatgatatgcgcacaatggcggaaaacggcggatttcttgatgactggcagaaagctaatgatctgtctaaagcgaggttatcagcacaagagagtgcagagtctgttttcgggcgtgatttggcaacagatgcactgattacgaatggagtaaaatcccttcaatcatcgtcagctaaaggtcttaatggtcctgctggattccattctatgatccgcgcgctgccagaatcagagcgtgttcctgctatatcatcaatgttgcaagatgctatctcgcatggtgtacgtggtggcaaagctgatgcagcaggaattaaccatatcgcagagatactgactccacaaaatgtaaaagccattagccgatattcctcagagcttggaagaattgctgatgcatatggcactcttgcaagagcagcagtgaaacctcagcagtatattgaaagaacaggtagaactgccaatgtactacgcgatctggatgctggtttatccaacgtcacatcaacagtgttaaatgcaattgccaattcaacatcaggtgccattgttggtggcgctggaggaggcattgcaggcgctgccgcaggtgctttagttggcgctgggttaaaaggcgctgtatctaaaattgccaccacacgtagtggtcggtatgcgatagagaaagcggttcaggaagcaactaaagcagtaagagcaggcggaagcaaagaagcattagcggcggcggaacgcagatttatggcaaataaggccgccgtaaaagcaatacgcgaggcactaggaaacgaagagttccagcgtttagcaagggctggaattgtggcatcgctaagcggaatggcacaggagtaattagtcatccatggatggattgagcttatctcgtgttgatgtggcaattttaccaacatttttcaaccaagattttaagaaggatatgtcgtccttaatatcatgaatatcctcattctttatacgatcaaccttatcctctaggctctctatagaacgctcaatgctagacagagagatttttaagtctccttgctcacgttccagtgaggatttgagagcacaatattcgttttctagaattcctattttttttgttagagagtgcattcgatactcatacaccaaactagaaacgactaatgcagccaacagaaaccattcaagcacaccaacctccttagttttgcgcaggataccagatgatactttattggtggagtggtgtgtgaaaacgtgtcaacgacaaaccatccacaacttgggcgaatgatttagcaaaaagtgctatttttggtgtttggtgtcatagaaaagtgaatagctcacttttcaacattgcatgaaacttgcaggaaatgtgacattaccttataggtaacttcggcgaaaatgcagtaaatgtgaaatgtaatgatttaaacgtgtcgataaagtggttgtaagttagcctctgaaggattgatgacagctttgttatggtattaaatgcaacttgacacagttgtatacatagctgcggctatcaagatggaggtatgtttatgctcacttgttttgatgtcgccgactacttcttggcgcattgcgatgaagaaagtggcgacattatctctaacctaaaaattcagaagttgacgtattatgcccaagggttttctctggttcttctgggtaagccgctatttaatgagaaaattgaagcctggatgcatgggccagtagttcctgaattgtatcgtaaatatagggactgtggtaacggagctttacctgcgccagaaaactttgacgctaaaaaattcagtgaagatgaaattgaattgctggatgaggtgtataaagtttatggtcagttttctgcctggaaactgcgcaatatgactcacgaagagcagccatggaaagatgcttacattgagggtgcggttagccaagaaatcacacttgattctatgaaaggttttttcaaaacgttaattaactgacgtgtatgtctagagttaagggaagaataaaacagagggataaagagagctctgctactgttggcctctctatccatcacgaatctcatgatgtagacaaaagtccgcctgtattttctcttagatacctacaaaaggggtattgcctagattgctgccaaaagcatgaaaaggcagcatttgcagataggctgttcaggttaagtcggatgtcatgggatgagatacgaaaatctgataaacacgggcttgggacggaaaaaattgccagaaacgcgataaaagctccgattcctaagcatgttactcaagatgtggatttcattgcgttcagattttgctctaaggcacctatggttggttataagataggagccactttttatgtcttatggctcgacagggagttcaagctatacaagcactaataaaacccaccgtcaggtgggtttttttgttggagataaaatggttaaccaaatcgatccttaaagcgtctatcgctgttgcgtctctccattttactgttgcagtacggacaaagatgctgtttctttccatcgatagtccatgtgaagtactttttcttaaatccagcaccacagatatcgcaacttcttggtttaaacatactggctatgaagataagaacaacaaatcctatgatccattccatatcatgtacctgttttaactttattttttgatttttagggattaatcagaaactttatcttgcgattaagcaaagctactagctaacaaaagagtgcgtatacaatcaatcgtttcacatcaacctcaacaaggagaaatcatgaccatagaagaacgcctgaacaacattgagttgaaccaaaccctgcttgaccagcgactttcagatcttgagcttaaagatctggatgcgcaaatatcagaagcagaagccaagctctccagcttaaaccaccgcaagaagcaaatccgcaacagaattactcagggacgcggaagccgttgaaatcatagtctattttttctcagagctcatattgtaataggtggtataaatagagattgatttctgacatgcttcaagaaattgctgcggagtcatcccgagccttgcttgctctgtagtaaggaatctctgtaagaattcattcccacctggcatgtttgtagattcttggaatattgccatttgtttgattgcaccacacataccagccattttagaagctatcatgaggccttgtatttcatcaaaactgctatcgtctgattttgtttctgcgttagctatgctcgagagacacaggagcaataggatagcgatacgtttcatttttcaccattgccatgcatacattttaacttctcaacatcatgctcaagctctatcagtcgcgatgctatagttgcaagatctagtgcttgaatgtgtttgtttttttcggtccatgcttcaagtgctgcgaccatctcagcatttaatgaacgagaattagcctcagccagttcaataagacgttcctttatctctacaggaagcctcagattcacttgagggtttttgtacttacgatcagacatcggcgcatcctgaataattttttaccacaggatatgtaggtatctattgactatcaatgcgtacctaaatactatgtatgcgtaccacatacaaaggagcaaaaatgaaagttaagacattaaggatgccagaatggctggaaaaggctttggagcagtccgcgaaaaaggatgatcggtcgttcagtaatgaggtattgaggagactaaaggagtcagtagctaaggatggaattgtttgtccagaatgagtaaagcccaagctattgcgagtagctcgggcttaaatcgccagtaaattttgaggaaaaactgacatgaaaagtatagcaacagcagtatctactatcaacgtgccattccacggcgcagagctttatgtcgtcaatcacaacggtgagccgtacaccccaatgaaacctatcgttgaaggtatgggtatggattgggcttcacagtttacgaaaataaagcaacggtttaaaacctccattgtgaaaatcacaatgcagcttcctggtgatgaacagtgccgtgagattatttgtttggcacttcgcaaacttgctggctggctgcaaaccatcagccctaacaaagtccgcactgaaatccgcgacaaggtaatccagtatcaggaagagtgtgacgatgtgctctacgaatactggactaaaggccatgtagttaacccgcgcaaagctaaaaaggcgttgccgggtaaaatcaccactgaacagcaggaagccattaaacaactcgtcatgagtcgcggtcagtctctgccaaaggaaaaacaggcgaaggcaatgattaccatgtggtcgtcactgaaatctcattttgggtgttcatacaaagaaatcagcgatgagcagtttaccgaagctctgtcacttgcagctcgcgttccgcttgaaggcgagttaatcggcaaacaagagaagaaagcaaacgagctttctgcaaaagaagcaaacagccttgtatggttatgggattatgccaaccgctcacaggcattattccgcgaactgtatccggcgctaaaacaaattcaatcgaactattcaggcagatgctacgactacggtcatgagttctcgtatgttatcggaatggcgagagacgttttaatcaatcacacacgagatgttgatattaatgagccagacggaccaacgaatctttccgcatggatgagacttaagaataaagaattacctccttcagtacataactactgacagataaccaacgcaacgacccagcttcggctgggtttttttatgcccaaaattcaccgtggccacgctgcggcgattcattgtatctggagcaaattaaatgacagacattacagccaatgtgatcgtatcgatgccttcgcaacttttcactatggcgcgttcttttaaagcggttgccaatggcaaaatttatatcggtaaaattgacactgacccggtgaatcctgaaaaccagattcaggtttatgtggaaaacgaagacggttctcacgttcctgtttcgcaaccaatcatcattaacgctgctggttatcctgtatataacggacagattgccaaattcgtaactgtgcaaggccattctatggctgtttatgatgcgtacggtgcgcagcagttctattttcctaacgtcctgaagtatgaccctgaccaattaaggcaagaattagcttctgacagaggagcaacattatcattaagtcagatagctacttcttacggccttgatttctcgttaggcggtgtatggcgggagggggcgttatctaatgttgataactggtggtggtataataataaaatctacaccggtggtagcggcactcttccgtcatctcctgctttgccatggtacgaagtgacggtagcagattatatttctgttgctcaatttttccccattactggtgatccagcggcagataactcagctagctttaatgctgctgcagcagttgctttatcggcaggaaagaggctgtttgtccctgcaggaacttactatgttaagtcaccagttgatttaacaataggcactgttgacctattcggggatggcgttgagaagtcattcattattgcggggagtgggttcactggagagacagttgtcaacatgtactacgaaactgactctataagacgtagcacatctatctctcacgttacagttgatgggaacaacatcgccaactatgcttgccgaattcaatatgttcacctaggaagaacccataattgtcgtttcatcaatggcgtggtggcgaacttctatactataaacgactggcttaatacctatgattgctgttcttttgttcctgcgccaaatcgcggagttcaccttgctggggctaacaaccgcgtaacgttcaataactgtggatttgcatcaaataaggtcggtgaatatgccttttatgcttctggtacttcccctattgaaggtttaagcttaattggatgtgaccttgagttcggcattgggcatggcatgtacttaaatacccgagtgaccaatattgttggcgggtactatggcgaagcgatacaaggcgatatctttacggttccagatggagtagtaaaaataagcggtgtaaatgcttttgtaggatattacaatgagggaggaaggtttgttgttcttgacaatgatgctgtagttaaggttgatagttgctggattgcagatcagggcaactttaaactttcattacttgcatcaagcactgacaacagggctcatgctgtatttactaattgttatattggtgcaactgtgtctggcccacaagttatggaaggagattgtttaggcaagattaatatgaggacgtttgcagaaagcagagcaatcctttatacaatgaacaatactggtaatacagtaaccagaagcagatacaactcaataggagcaaaaataaccattaataccgtaacgacccctagttctaacaagctatcacttaatactaagataaaagacagagggtggaaggttaacgaccgggtatacttaattgttacttatgagagtaatgttgatataaatatttatttaagcagttcgatatatgctgcatcggatgcaacgctatttggaactttaccatcaacaaatggttctttatctacgtgttatattgctaataatattattccggaaaatacatctgagatattcgagttttatgtaaatggcgctggtgttggcgattactttgctattcaggatgttactcttacagacaggtcattcactttcagtggaacaactatgaccacttttgctaaggctgaataattaacagaaaaggtggatcactccaccttttcatcaaaatccaatccgcccaccactgcatcacttctctgcgcttatcgagatactgagcatggttgtaaattcaactaacccagtgcgttgacaaaaaattagcgcaagaggacaaaaatcaccttgcgctaatgctctgttacaggtcactaatactatctaagtatttgattcatagtgactggatatgttgtgttttacagtattatgcagtctattttttaagctaaatgcattataagacattgatattaatgattttactgtttcttgttcagcttttttatactaacttgagcgaaacgggaaggtaaaaagacaaaaagttgtttttaatacctttaagtgataccagatggcattgcgccatctggcagagtgattaactaaacatcgcagtaatcgaggcgcttgccagagagtggaaatgaacgttaaacccgaccatcgcgccgctggcaccttcatcgacatcaatacgttctatatccagcgcgtgaacggtaaaaatgtagcgatgagtttcgcctttcggcggtgctgcgccatcgtacccggttttaccaaagtcggtacgcgtctgcaaaacgccgtctggcattgctaccagaccagagccaaacccttgcggtaatacgcgggtatcagcgggtaagttaacaactacccagtgccaccagccggagccggttggcgcatccgggtcgtagcaggtgacaacaaaacttttcgttcccgcaggaacatcatcccacgccagatgcggtgaaatattatcgccatcgtaacccatgccgttaaagacatgacgatgcggcaatttatcgccatcgcgcagatcgttactgatgagtttcatgaaccctcctttcttgtttgcagaaagtgtagccagaaaccctcacgcggacttctcgttattggcaaaaaaatgtttcatcctgtaccgcgcggttaaccgccgcggtcagacgctgcaactgttgcgggagaataatatagggcggcatcaggtaaatcagtttgccaaaaggccggatccagacaccctgttcgacaaagaatttttgcagcgccgccatattcaccggatgagtggtttcgaccacgccaatggcccccagtacgcgcacatcggcaaccatttcggcatcacgggcgggggcaagttgctcgcgcagctgtacttcaatatccgccacctgttgctgccagtcgccagattcgagaatcgccaggctggcgtttgctgccgcgcaggccagcggattgcccataaaagttggcccatgcataaagcaaccggcttcaccgttactgatggtttctgcaacctcgcgcgtggtgagtgtggcggaaagggtcattgtgccgccggttaaggctttaccgaggcacaaaatgtccggcgcgatttctgcatgttcacaggcaaacagtttcccggtacgaccaaatccagtggcgatctcgtcggcaatcagcaagataccttcgcgatcgcatattttgcggattcgttttaaccattccggatggtacatgcgcatcccgcctgcgccctggacaatcggctcaatgatcaccgccgcgatttcatgacgatgcgccgccatcaggcgggcaaagcccaccatatcgcgctcatcccattcgccatccatgcggctttgcggggcgggagcaaacaggttttctggcaggtagcctttccacagactgtgcattgagttatccggatcgcacaccgacatcgcgccaaaggtatcgccatgataaccattgcggaaggtcagaaaacgctggcgcgcttcgcctttggcttgccagtactgcaacgccattttcatcgccacttccaccgctacggaaccggagtccgcgagaaaaacgcactccagcggttgcggcgtcatcgccaccagtttgcggcacagctcaatggctggcgcatgggtgataccgccaaacatcacatgcgacatggcatcaatttgcgacttcatcgccgcattaagctgcgggtgattgtagccgtggatcgccgcccaccaggacgacataccgtcaaccaggcgtctgccgtcagacaaaatcagctcgcaaccttcggcgctcaccaccggataaaccggcagaggggaggtcatggatgtgtatgggtgccagatatggcgttggtcaaaggcaagatcgtccgttgtcataatcgacttgtaaaccaaattgaaaagatttaggtttacaagtctacaccgaattaacaacaaaaaacacgttttggagaagccccatggctcaccgcccacgctggacattgtcgcaagtcacagaattatttgaaaaaccgttgctggatctgctgtttgaagcgcagcaggtgcatcgccagcatttcgatcctcgtcaggtgcaggtcagcacgttgctgtcgattaagaccggagcttgtccggaagattgcaaatactgcccgcaaagctcgcgctacaaaaccgggctggaagccgagcggttgatggaagttgaacaggtgctggagtcggcgcgcaaagcgaaagcggcaggatcgacgcgcttctgtatgggcgcggcgtggaagaatccccacgaacgcgatatgccgtacctggaacaaatggtgcagggggtaaaagcgatggggctggaggcgtgtatgacgctgggcacgttgagtgaatctcaggcgcagcgcctcgcgaacgccgggctggattactacaaccacaacctggacacctcgccggagttttacggcaatatcatcaccacacgcacttatcaggaacgcctcgatacgctggaaaaagtgcgcgatgccgggatcaaagtctgttctggcggcattgtgggcttaggcgaaacggtaaaagatcgcgccggattattgctgcaactggcaaacctgccgacgccgccggaaagcgtgccaatcaacatgctggtgaaggtgaaaggcacgccgcttgccgataacgatgatgtcgatgcctttgattttattcgcaccattgcggtcgcgcggatcatgatgccaacctcttacgtgcgcctttctgccggacgcgagcagatgaacgaacagactcaggcgatgtgctttatggcaggcgcaaactcgattttctacggttgcaaactgctgaccacgccgaatccggaagaagataaagacctgcaactgttccgcaaactggggctaaatccgcagcaaactgccgtgctggcaggggataacgaacaacagcaacgtcttgaacaggcgctgatgaccccggacaccgacgaatattacaacgcggcagcattatgagctggcaggagaaaatcaacgcggcgctcgatgcgcggcgtgctgccgatgccctgcgtcgccgttatccggtggcgcaaggagccggacgctggctggtggcggatgatcgccagtatctgaacttttccagtaacgattatttaggtttaagccatcatccgcaaattatccgtgcctggcagcagggggcggagcaatttggcatcggtagcggcggctccggtcacgtcagcggttatagcgtggtgcatcaggcactggaagaagagctggccgagtggcttggctattcgcgggcactgctgtttatctctggtttcgccgctaatcaggcagttattgccgcgatgatggcgaaagaggaccgtattgctgccgaccggcttagccatgcctcattgctggaagctgccagtttaagcccgtcgcagcttcgccgttttgctcataacgatgtcactcatttggcgcgattgcttgcttccccctgtccggggcagcaaatggtggtgacagaaggcgtgttcagcatggacggcgatagtgcgccactggcggaaatccagcaggtaacgcaacagcacaatggctggttgatggtcgatgatgcccacggcacgggcgttatcggggagcaggggcgcggcagctgctggctgcaaaaggtaaaaccagaattgctggtagtgacttttggcaaaggatttggcgtcagcggggcagcggtgctttgctccagtacggtggcggattatctgctgcaattcgcccgccaccttatctacagcaccagtatgccgcccgctcaggcgcaggcattacgtgcgtcgctggcggtcattcgcagtgatgagggtgatgcacggcgcgaaaaactggcggcactcattacgcgttttcgtgccggagtacaggatttgccgtttacgcttgctgattcatgcagcgccatccagccattgattgtcggtgataacagccgtgcgttacaactggcagaaaaactgcgccagcaaggctgctgggtcacggcgattcgcccgccaaccgtacccgctggtactgcgcgactgcgcttaacgctaaccgctgcgcatgaaatgcaggatatcgaccgtctgctggaggtgctgcatggcaacggttaataaacaagccattgcagcggcatttggtcgggcagccgcacactatgagcaacatgcagatctacagcgccagagtgctgacgccttactggcaatgcttccacagcgtaaatacacccacgtactggacgcgggttgtggacctggctggatgagccgccactggcgggaacgtcacgcgcaggtgacggccttagatctctcgccgccaatgcttgttcaggcacgccagaaggatgccgcagaccattatctggcgggagatatcgaatccctgccgttagcgactgcgacgttcgatcttgcatggagcaatctcgcagtgcagtggtgcggtaatttatccacggcactccgcgagctgtatcgggtggtgcgccccaaaggcgtggtcgcgtttaccacgctggtgcagggatcgttacccgaactgcatcaggcgtggcaggcggtggacgagcgtccgcatgctaatcgctttttaccgccagatgaaatcgaacagtcgctgaacggcgtgcattatcaacatcatattcagcccatcacgctgtggtttgatgatgcgctcagtgccatgcgttcgctgaaaggcatcggtgccacgcatcttcatgaagggcgcgacccgcgaatattaacgcgttcgcagttgcagcgattgcaactggcctggccgcaacagcaggggcgatatcctctgacgtatcatctttttttgggagtgattgctcgtgagtaaacgttattttgtcaccggaacggataccgaagtggggaaaactgtcgccagttgtgcacttttacaagccgcaaaggcagcaggctaccggacggcaggttataaaccggtcgcctctggcagcgaaaagaccccggaaggtttacgcaatagcgacgcgctggcgttacagcgcaacagcagcctgcagctggattacgcaacagtaaatccttacaccttcgcagaacccacttcgccgcacatcatcagcgcgcaagagggcagaccgatagaatcattggtaatgagcgccggattacgcgcgcttgaacaacaggctgactgggtgttagtggaaggtgctggcggctggtttacgccgctttctgacactttcacttttgcagattgggtaacacaggaacaactgccggtgatactggtagttggtgtgaaactcggctgtattaatcacgcgatgttgactgcacaggtaatacaacacgccggactgactctggcgggttgggtggcgaacgatgttacgcctccgggaaaacgtcacgctgaatatatgaccacgctcacccgcatgattcccgcgccgctgctgggagagatcccctggcttgcagaaaatccagaaaatgcggcaaccggaaagtacataaaccttgccttgttgtagccattctgtatttggttaaattgcgagcgagatcgcgtcttcgattgactgcaatttaaccaattaaattctaaaataatcacgaaaaaaattttacttccgcctcatgcggcgaatgtgggaattgcccaggcggcgggggataggggctggagacagttatccactattcctgtggataaccatgtgtattagagttagaaaacacgaggcaagcgagagaatacgcggcttgcacgcgaattggcgttaaagacggctcaaagaaatatcttttattttttaactggttagataaatgcaatggcagtcactgaacaggcatctcttgccataaaactgtcatcactcatcttgacaaatgttaaaaaagccgttgctttggggataacccggtaaggccggagttttatctcgccacagagtaaattttgctcatgattgacagcggagtttacgctgtatcagaaatattatggtgatgaactgtttttttatccagtataatttgttggcataattaagtacgacgagtaaaattacatacctgcccgcccaactccttcaggtagcgactcatgagtaaaccgttcaaactgaattccgcttttaaaccttctggcgatcagccagaggcgattcgacgtctcgaagaggggctggaagatggcctggcgcaccagacgttacttggcgtgactggctcagggaaaaccttcaccattgccaatgtcattgctgaccttcagcgcccaaccatggtacttgcgcccaacaaaacgctggcggcccagctgtatggcgaaatgaaagagttcttcccggaaaacgcggtggaatatttcgtttcctactacgactactatcagccggaagcctatgtaccgagttccgacactttcattgagaaagatgcctcggttaacgaacatattgagcagatgcgtttgtccgccaccaaagcgatgctggagcggcgtgatgtggttgtggtggcgtctgtttccgcgatttatggtctgggcgatcctgatttatatctcaagatgatgctccatctcacggtcggtatgattatcgatcagcgcgcgattctgcgccgactggcggagctgcaatacgctcgtaatgatcaagcattccagcgtggtactttccgcgttcgtggcgaggtgatagatatcttcccggcagaatcggatgacattgcacttcgcgtggaactgtttgacgaggaagtggaacgattgtcgttatttgacccgctgaccgggcagattgtttccactattccacgttttaccatctacccgaaaacgcactacgtcacaccgcgcgagcgcatcgtacaggcgatggaggagatcaaagaagagctggccgccagacgcaaagtgctgttggaaaacaacaaactgctggaagagcagcggctgacccagcgtacccagtttgatctggagatgatgaacgagctgggctactgttcggggattgaaaactactcgcgcttcctctccggtcgtggaccgggtgagccaccgccgacgctgtttgattacctgcctgccgatgggctgctggtcgtcgatgaatctcacgtcaccattccacaaattggcggcatgtatcgcggtgaccgggcgcgtaaagagacactggtggagtacggcttccgcctgccatcagcgctggataaccgtccgcttaagtttgaagagttcgaagcattagcgccgcaaaccatctatgtttcggcgacgccgggtaattacgagctggaaaaatccggcggcgatgtggtggatcaggtggtgcgtccaaccggattgcttgacccgattatcgaagtgcggccggtggcgacacaggttgatgatcttctttcggagattcgtcagcgagcggcaattaacgaacgcgtactggtcaccacactgaccaagcggatggcggaagatcttaccgaatatctcgaagaacatggcgagcgcgtgcgttatcttcactcagatatcgacaccgtcgaacgtatggagattatccgcgacttgcgtctgggtgagttcgacgtgctggtagggatcaacttactgcgcgaaggtctggatatgccggaagtgtcgctggtggcgatcctcgacgctgacaaagaaggcttcctgcgttccgaacgttcgttgatccagaccattggtcgtgcggcacgtaacgttaacggtaaagcgattctctacggcgataagatcaccccatcaatggcgaaagcgattggcgaaaccgaacgtcgccgtgagaaacagcagaagtacaacgaggaacacggaattacgccgcaaggcttgaacaagaaagtggtcgatatcctggcgctggggcagaacattgccaaaaccaaagcgaagggcagaggaaaatcgcgcccgattgttgagccggataatgtgccgatggatatgtcgcctaaagcgttgcagcagaaaatccatgagctggaagggttgatgatgcaacacgcgcagaatctggagttcgaagaagcggcgcaaattcgtgaccagttgcatcagctgcgtgagctgtttatcgcggcatcgtaacaggatagcgaagaagactgatgacaaacggaaaacagcctgatgcgctacgcttatcaggcctacattttctccgcaatatattgaatttgcgcggtttgtaggccggataaggcgttcacgccgcatccggcataaacaacgcgcactttgtcttcaataggaagccggaattttccttcggatttccgttaacctaaagcctgtaacgccttttccagcgcgttatgtaacaactggcggtcatgacgatacggaatatcgctggcctccagtacctcctggatcacaatccgctctttcaccgccgagacatccacttttggcccgacgatgaccgcatcaatgacctttttaccaacatactgctccataattgccagcttgctttccagcttcaaattagccgcaggtaaactcaactcacgccccagattgccgatataaaccatcggcgctggcgtgcggcgtaatgcctgggcgcctttaacatcaagtttccgagattatgaccggaaagttcgccattgccaccaaaacggtattcaaacatcgcggaggcgacgctcggttccgttatcagctggttgaggcagttgcgcatatcgccccaggcaatgccgccttctgaacggcgaatacgccccgtcgagccaccattatcggtggtggtgacgatacccgttaaacgagaacccaaagacgaaagtgatgagagaacgcgtcccagtccatgccctccgccgagagcaacgacacgatcaagatcagccagcgtacgattgcgcatatagtttcctggagtcagattatccgcgctacagtagcgcaaattgcggggaaacagcaattaacctgccaatattgaggatacaaactattttcttctacctctaaaggacgatgcacgctatgcctccctgatgatgtatatcaaagtaaaaccgccattttcccttattctgtagcgaaatagcacgatcatgacgctatatacatgattacatagcgaaagtgtggatggtaaaaatctcatttacacgctagtatcggcataaccactaaacactctagcctctgcacctgggtcaactgatacggtgctttggccgtgacaatgctcgtaaagattgccaccagggcgaaggaagaaatgacttcgcctcccgtatctggaaaggtgtacatggcttcacaactgactgatgcatttgcgcgtaagttttactacttgcgcctgtcgattaccgatgtgtgtaactttcgttgcacctactgcctgccggatggctacaaaccgagcggcgtcaccaataaaggctttcttaccgtcgatgaaattcgccgggttacgcgcgccttcgccagtctgggcaccgaaaaagtgcgcctgacaggaggagagccgtctttacgccgcgactttaccgatatcatcgccgctgtgcgggaaaacgacgctatccgccagattgcggtcacaaccaatggttaccgtctggaacgcgatgtggcgagctggcgcgatgcgggacttactggcattaacgtcagtgtcgacagtctggacgcccgccagtttcacgctattaccgggcaggataaattcaaccaggtcatggcagggattgatgctgcatttgaggccggttttgagaaggtcaaagtcaataccgtgctgatgcgtgatgttaatcatcaccagctcgacacctttctgaactggatccagcatcgccctatccagctgcgtttcatcgaactgatggaaacgggcgagggcagcgagctcttccgtaagcatcacatctctggtcaggttctgcgtgacgagctactgcgtcgcggctggatccaccaattacgtcaacgcagcgacggtcccgcgcaagtcttttgccatccagattacgccggagagattggccttatcatgccgtatgaaaaagacttctgcgccacttgcaaccgcctgcgcgtttcctccattggtaaactccatctctgcctgtttggtgaaggcggcgttaacctgcgcgatctgctggaagacgatacccagcaacaggcgctggaagcgcgtatttcagcggcgctgcgggagaagaaacagacccatttcctgcatcaaaacaacaccggtattacgcaaaacttatcgtacattggcggctaaaacgtcaaaaggagagatcagatgagtcaggtaagcactgaatttatcccgacccgtattgctattcttacggtttctaatcgtcgcggtgaagaagacgatacctccggtcactatctgcgcgattcggcgcaagaagcgggccatcacgttgtcgataaagccattgtgaaagaaaaccgctacgctattcgcgctcaggtatctgcgtggatcgccagcgacgatgtacaagtggtattgattacgggtggtactggcctgacggaaggtgatcaggctcccgaagcattgctgccgttgttcgaccgtgaagttgaaggttttggtgaagtgttccggatgttgtcgtttgaagagattggcacttccacgttgcaatctcgtgcggtagcgggcgtcgccaacaaaacgctgattttcgccatgccgggttcgaccaaagcgtgccgtaccgcatgggaaaatatcatcgcgccgcagctggatgcccgtacgcgtccgtgtaatttccatccacatttgaagaaataagtatgtcgcaactgacccatatcaacgccgctggcgaagcgcacatggtggatgtctccgccaaagcggaaaccgtgcgtgaagcgcgggcggaagcctttgtcaccatgcgcagcgagacgctggcgatgattattgatggtcgccaccacaaaggcgacgtatttgccactgcgcgtattgccggtattcaggcggcaaaacgcacctgggatctgatcccgctctgtcatccgctgatgctcagcaaagttgaagtcaatttacaggccgagccggagcacaatcgggtgcgtatagaaaccttatgccgcctgaccgggaaaaccggtgtcgaaatggaagcattaaccgcggcctccgtggcggcgctgaccatttatgacatgtgcaaagcggtgcaaaaagatatggtgattggtccggtacgtttgctggcgaagagcggcggcaagtcgggtgactttaaggtggaagcggatgattaaagttctttttttcgcccaggtgcgcgagttggtgggaacagatgcaaccgaagtggctgcggatttcccaactgttgaagcgttacgccagcacatggctgcgcagagcgatcgctgggcgctggcgctggaagatggcaaattactggctgccgtcaaccagacgctggtgagttttgaccatccgctgactgacggcgacgaagtagctttcttcccgccggtaaccggaggttaagatggcagaaaccaaaattgttgttggtccgcagccgttcagcgtaggagaagagtacccgtggctggcggagcgtgacgaagacggtgcggtagtcacctttactggtaaggtgcgcaaccataacctgggcgacagcgtcaacgcattaaccctcgaacactatccggggatgactgaaaaagcactggcagaaattgttgatgaagcgcgtaaccgctggccgctggggcgcgtcactgtgattcaccgcatcggggaattatggccgggcgatgaaatcgtttttgtcggtgtcaccagtgcgcatcgcagcagtgcgtttgaagccgggcagtttattatggattatctcaaaacccgcgcaccgttctggaagcgcgaagccacgccggaaggcgaccgctgggttgaagctcgggagagcgatcagcaggcggcaaaacgctggtagttttttgttagccggataaggcaccgctgcgtccggcaatttcaccgctcagtacatacgtttacgctgcgtcgatgcacagcctcatcattttgcagtatccttaagatattccttatatcttcaggagatcgtcatggacagattcccacgttctgattcaatcgtacaaccccgggctggcttgcaaacttatatggctcaagtctatggctggatgaccgttggcttgttgctgaccgcatttgttgcctggtatgcggctaattccgcggccgtgatggagctgttgttcactaaccgtgtctttttaatcggtctgatcatcgcgcaattagcattggttattgtgttatcagcgatgattcaaaagctgagcgcaggtgtaacgacgatgctctttatgctttattcggcgctgacgggtcttacgctttccagtatattcattgtctataccgctgcttctatcgccagtactttcgtcgttactgccgggatgttcggcgcaatgagtctgtacggttacaccacgaagcgcgatttaagtggctttggcaatatgctgtttatggcgttaatcggcattgtgctggcatcgctggtcaacttctggttgaaaagcgaagcattgatgtgggcagttacctacatcggcgtgattgtctttgtcggattgacggcgtatgacacgcagaaactgaaaaatatgggtgagcagattgatacccgcgacacgtcgaacctgcgcaaatattccattcttggcgcgttaaccttgtatctggacttcatcaacctgttcctgatgttgttgcggatcttcggcaaccgccgttaattctttttcaccatcactatcccggccatgtgtcgggatttttttcttactaaaaacgacacttaacaagtaccaggtataaaatatgccttatggacgagcggaagcgttttctgtatccataaatgcaaaagtattttgtatgcgtggttttaaatttattgatggtgaatattaatattttttctaaggataactaaaagaatggaatcatactcgcaaaacagcaataaattagattttcagcacgaggccaggatattaaacggtatatggctcattaccgctttaggtttggtggcaaccgcaggactagcctggggagctaagtatctcgaaattacggcaaccaaatatgattcaccaccaatgtatgtcgccatagggttattattactttgtatgtatggcttaagtaaggatatcaacaagataaatgccgccatcgcgggcgtaatatatctgtttttactctctttggtggcgattgtcgttgcaagtttagttcctgtatatgccattatcatcgtgttcagcactgcgggcgcgatgtttttaatcagtatgctggccggtttattatttaatgttgatcctggttctcaccgttttatcattatgatgacgttgacagggttggccctggtaatcatcgtgaatgcggcattaatgagtgaacggcccatttgggtaataagttgcttaatgattgtgttatggtcaggcattatctcgcatggacgaaataagctccttgaattggcggggaaatgccatagtgaagagttgtggagtccggttcgttgcgcttttacaggtgcattaacactctattactattttatcggcttctttgggatacttgccgcgatagctataacgcttgtctggcaaaggcatacgcgtttttttcattagccgtaaatgcacatactaaagaacttaactaaacttcacatcgccgcttcatttttcgcccgtagcttcttcgcctggctttccagcaacaggtaacagatcagcgccagcagcagtgggataaagtaatacagcacacggtaagcgagtagggcggcgataattgtacctttggaggtatgctccccagccagtagtgcgataaacaccgcttccagcacaccgatccccgccggaatatgcacgatgacgccagcaatactactaaccagtaacacgcccagtacaaagaaatagttcacgctttgaccaagtaacagccagataatcgcccccattaccatccagttaacgctggaaatcagcatctgagcgagggcgaatttccatgaaggcagcaccagcttttgccctttgatggtcatatggcggtgcttcgcgaaagcgcaaaaccacaaataaaccgcgataatcatcagtaagccaatgccgagaatacgcagcgtagtttgatcgacataccagtgatccggcaactccaccacgcctgcggtaaagataatccctgccagtaaaatgtagcccagccagttggtggtaatactgagcgagaaaatccgcgtaatagtgctaccgggcaaccccagacgagagtacaaacgatagcgcataccaatgccgccgacccaggtactgagcgtcaggttgaaggcgtagcagataaacgacaccagcatcacctggcgcttcgccagtttgtgaccgcagtaaaagcgggcgagcaggtcatagcagccgtaaatcagattgctgacgaccaccagcccgaccgcactaagcagcgcaacgcgattgtagtcgcggatgaccttccagacctcttcccagtccacttttttggcgtagaccaccagcaacacaatcaccgcgataaaaaacagccaggtgaggatcttctttgctaagcgccagcgcgggtgtgatttactcatcagggttttacccccgtgttttcagtttctacccgatcctgcgtttccattgtcggttgtgcgggcggatcaacctgcgccagacgtggcgtgtgtgccggaagccagccaaccagcgccgggaagtggcgtaaaaagtggaacgccagcacgcttttggtcaggttccaccaggtgcgtttgggcagcatggtttcatccacctgctgacaatctgcggcaataatgccgttcagattatcgcgcagcgtctggttaaaatgacgatcgtggatgatgacatttgcttcgagattcagtgacaaactgagcggatcgagattactggaccctactgtcgcccagtgatcgtccatcaatgccactttgccgtggagcgggcggcggcggtactcaaaaacctgaacgccgcctttaaccagatagttatacagcaagcgcgcaccgactctgacaatcggcatatccggttcgccctgaatgatcagtttgatccgcaccccgcgccgtgccgctttacgcaaggcgtgtaaaaatcgatagccggggaagaagtaggcgttggcgataatcacttcccgccgcgcctgagtgagcattttcaaataatggcgttcaatatcatcgcgatgttcttcgttatcgcgccagaccagcaatacctgcgcttctcccggctggcggttctcttccgctttgtgatgacgtcgccaccagcgtcgtgccgcgctctgtccaggcaggttttccagctcaaactggagaatatcttcgacaatcggcccttcaaggcgtaccgcgtaatcctgtttagcctctggaccgtagctggacatatgctcggcggagtaattcagcccgccaataaaggctatacgcgcgtcgatcaccacaattttgcgatgcatccggcgaaacacattggtgcgcataccaaaaaggcgagggcggggatcgtagtagcggaacactacgccagctgccgtcagttcattgacaaactcatcgctgagatccggcgaaccgtagccatccagcaagacttccgctttaaccccgcgttgcgctgctgccagtagtgccgcatgcagttgtttgccgacgtcatcctcaaaccagataaacgtttcaagaatgatgcgttcttgtgcctcgccaatcgccttaaacaccgcgggataatattgctcgccgttttccagcaactggatcttattgccttcgcgccagctacatttcataaatgaatctccgcacttaaaggggcatgatcagaaaggtgtcgccatgtccgcagcggcaacgcggttggcgcgctggcgctggcatttttgacgtagatcctgtccagtcgtagtagaggaaattgcaccggaaacgtgcgcgccgggcgtccgtgggcgcgggtaaaaatctcatccagtccggcctgcacttttaacggatgattagctttttgccgccagtcattgaaatcacccgccaccaataccggttcgccgtccggtagctcattcacccattcggcgagcatcgcaagctgcgcctgacggtgcgcctcacgcaggcccagatgtacgcacatcacatgaatcgcttttccggtcatcggcggcacaatgcggcagtagagcacgccgcgcttttccgcaccatcgaccgaaacatcgcgattctcataatgttcaatgggataacgcgacagtacggcgttgccgtgatgcccttccgggtatacggcattgcgaccgtaggcaaaatcgctccacatagtgtcggcgagaaactcgtagtgcgaggtatcgggccagttttccacatgcagcggatgaacttcgtgcgcgcccatcacttcctgcaggcaaacaatatcggcgctgacggtacgcacggcgtcgcgaagttccggcaaaatgaagcgtcggttaaacgcggtaaagcctttgtgaatattgatggtgagcaccttgaacgaaaattgttgtgtttgatcgggcataattttcctgtctttgcctcttatctcattgaaatagtgtagtcggcgtcacaaaaaggtgcggtcttacggaattttccgtaaagttcggtactctgagtaagtagagataaattcttcaggagagaagccatgaagtggcaacaacgtgttcgtgtcgcaacgggtctaagttgctggcagattatgttgcatttactggtagtggcgctgctggtggtgggctggatgagtaagactctggttcacgtcggcgtgggattatgcgcactgtattgtgtcacggtagtgatgatgctggtgtttcagcgccaccccgagcaacgctggcgtgaggtggcagacgtgctggaagagctgaccacgacctggtattttggcgcagcgctgattgtgctgtggctgttgtcccgcgttctggaaaacaactttttgctggcaattgcagggctggcaatccttgccggcccggcggtagtgtctttgctggcgaaagataagaagttacatcaccttacgtctaaacatcgcgtacgccgctgaccctgtcgtggccgttatcaccagtagcggccacaaactattccacacaatatccagactcgcatccttcaaataaatctgcttggtaatgtccgtaaagtggcgaatagggttaatccacgtcaggttttgcagccataccggcatgttttccaccggagaaacgtaaccggaaaggagaatggcgggcatcataaagacaaacacgccgataaacgcctgctgttgtgttgaacagagtgatgaaatcaacagaccgaatcccaccagcgataaaccataaatcaccatcgtaaagtagaacagcgccagcgatccggcgaaggggatttgatacgcccagataccaatcgccagcacaatggtggcctggaaggtggcgacaattaacgccggtacggctttgccgatgaagatctgccaggtggtgagcggcgaaaccagtagctgatcgagcgtaccttgttcacgttcgcgggcgacggaaagtgaagtgacgatcattacgccgatagtggtgatcatggcgatcagtgacggcaccacaaaccatttgtagtcgagattcgggttataccagttgcgtaccaccagctcgctgttgttaggtttcggttttccttccagcagctcctgctgataatttttgacgatctgttgcaggtagttggcggcaatttgcgcactgttggagttacgcccgtcgaggatcaactgcaaaggcgcggtctggaaggtatccagtttgcgcgagaagtcagccgggaaacgcaccagtagtaacgccttttgtgtgtcgatggttgggcggatctcctgtgggcttttcagcagcagcacatgagtaaaggcgctggcgcgggcaaaacgttgggtcagctccaccgaatgctcgccgttatcttcatcgtagatggcgatggtggcgttagtcacttccagcgtggcggcgaacgggaacaggatcacctgaattagcacgggtaaaatcagaatcgcgcgggtttgcggttcgcgcagcaacgactgcaactctttgcggattaacgtccataagcgatgaaacatgctcttctccctaatccagccgacgtttggttttcagccacgtcaggccgataaacatcaccgccgaagcgatcaaaaacagcacgtttaccaccagcaccactggaatattcccggcgaggaacaggctttgcagggtgctgacgaaataacgagcgggaataatgtacgtcaccgcgcggatcaccgcgggcatactgtcgatctgaaaaataaagccggaaagcataatcgacggcagaaaagcggcgttcagggcgacctgagcggcattgaactggttgcgggtaatcgtggaaatcagcagccccatccccagggtactgagtaaaaacaggctggagataaaaaacagaatcagcagcgacccgcgatacggcacgccgagaataaacactgacaccagcatacacagcaacatcgccagcatcccgagaaagtaataagggatcagcttacacagcagcagttccgtgcgggtaatctccgtagagagcagagcctccatggtgccgcgttcccattctcgcgccaccaccagcgaggtgagaatcgcgccgatgaccgtcatgataatggtcaccgcaccggggataatgaagtgctggctaatcgccgccgggttaaaccagtagcgggtttgtacatcaataagcggttcaaaagtctgcccgttgtcctccgctcgctgcatttgccagatctgccagatcccttcgacatacccctgtacaaagttagcggtattcggctcactgccgtcggtgatcacctgaatcggtgcggtggcgttggcgcgctccatctgttccgcaaaatccaccggaataaccaccagaccgcgaattttccccgcctgcattttggcgatcagttcctgacggttatcgctgatggtggcgtcgatgtagggcgaaccggtcatggtgtgggtgaaatccagcgccgcttcgctacgctgttccagtaaaatcccgacccgcagcttgctggagtcgaggttaatgccgtaaccaaaaataaacagcagtagcagcgggatcactaccgcaatcagccagctactcggatcgcgaacgatctgccgcgtctctttaacgcacagcgcccgtacgcgacgccaggacaggatcgggttactcattgctatgctccttatcccagtcgtggatcaactgaataaaggcttgctccatggtgggatcgggttgctcatcgttagccgactgtgctttcaaaccgtccggcgtgccgctggcgattaatttcccgcggtacaccaggccgatgcggtcgcaatattccgcttcatccataaagtgggtggtgaccatcaccgtgacgcctttctctaccatgctgttgatgtgcagccaaaattcacggcgggtgagggggtcaacgccggaagtcggttcgtcgagaaacagaatgtccggttcatgcatcagcgaacaggccagcgccagccgctgtttaaaacctaatggcagttcatcggtggcgtgggaggcgatacttttcaggccgaacgcctcgctcatgcgggagattttttcgttctgcgcccgaccgcgtaagccatacacaccagagaaaaagcgtaaattctgttcgaccgtcaggttaccgtagagcgaaaatttttgcgccatatagccgagatgctggcgcgctttaccggaactctctttcagatccatccccagcaccagcgcctggccggaagtcggcaccagcaaaccgcacatcatcttaaaggtggtcgatttacccgcgccgtttggccccagcaaaccaaaaatctccccacgtttaacggcaaagttgacgtgatcggtggcggcaaaatccccaaatttcttggtcagttctttcgcttcgatcaccgtctcgccgggtgtgccttctaccgtatgtaatattgcgcccagcggcgattccgaggttccggcaccgcccagcaaatcaataaacgcatcttcaaaacgcggcgtagtttcgttgatgttgatttccggcatcccgtcggcatggcgaatatcgtctggtgtggcctcttttttgaggatcagacgtaccgatttcccctgaatcatgccgtcgctgacctgcggcagtttcaaggcgcgttgcaacagtttgcggttgccctcgtgtggactggtcatcagaaagctgcgtccggccatggtttgtgtcagggcttttggttctccctgatacagcaactcgccttcgttcatcagtaacacgtcacggcactgctcggcttcgtcgagatacgaggtactccagaggattaacatcccttcgcccgccagctcatgcaccatctgccacagttcgcgccgtgagatagggtcaacgccgacgccgggttcatcgagcagcaacactttcggttcgcccaccagggtacaggccaggccgagtttttgtttcatcccaccggagagcttgcccgccaggcgtccggtaaacggcccaagagacgtaaactccagcaggcgagcaaaagtttgcttacgtgcctcgccggtgacgctgcgcaaatccgcgtacagattgaggttctccatcaccgtgagatcttcatacagaccaaatttctgcggcatataaccgagcacggcgtgcagcgcgccgtcgtttttgatcggatcaaagccaatcaccgtggcactgccgctgtcgggtttcagtaatcccgccaacatccgcatcagcgtggttttacctgcaccgtccggccccaccaaccccgtcacataaccggcgtgaatggtacaatcgagcggcgcgacggcgggcttgtccatgcccggaaagcgtttttccaggccgttcagcgtgataacggcatcattcatgtcctgcctcgtcaccgaattgtaccgtcactggcattccctggcgtaacgcatcatcggcgtcggtcaccacaatacgcaggcgatagacgaggtcggtacgcagatccggcgtttcgacggttttcggggtaaattcagcagtcggcgaaacgaaaccaatctgcccgtgatacggcttgtccgggcgaccatcggtataaagcagcactttgcgccccggctgggcctggtcaagattacgttcatcaacataagcgcgcacccacaccggacgcgttagtgaaacggtaaacaccgtgccaccttcattgaggaccgtgcctggctccaccgcgcgcgttaacagcgtgccatcagacggggctatcaacgttgagtcctgtaaattcaactccgcctgcgccagttgcgcctgcgcctgttcgaggctggctttcgcctgagcgatgtcctgttcacggttaccggaacggtactgacgcaatttatcctgtgctgatttcagcgttgcctgcgcctggtcgcgcgaggagcgggcattttccaggtcatttgccgaaatagtgcggcttttccacaacccttgctggcggttatagaagttctgcgcatagtcataggcggcttgcgcctgtttcaccgctgcggcggcctgagcgatttcttcatcgcgatacccggcaagcatcaggtcatactgcgcctgtgccaccgaaacacccgctttcgcctgcatcagggcaatctcatacggcttgtgatccagttcgcccagcacctggcccgctttgatagcatcaccttcgtccaccgccagcgattcaacgcgccccccaacacggaaactaagatttaccgtacgaatatccacgttgccatacagcgtcaggccgttatcctggcggctttgataccaccagtagcctccggcaaccacggcggcaagtaccactaccgccaatccgatcacgacaggttttttcatcactacaaactcctttgcgataatccttgcaaaatcaggtcgatatgacaggtcaccgtctggttgatcagttcggtcttttcttcatcgaacgcggtccagccggtacgtaacagaattgtttctttgccaagacggaacgccagaatctcaccaatcaacgcatgggtatgaaggatcatgcgggtgtcattggcgtcgcagccggtccaggcggcaatcaggcgtgtcaggtggctgtgtagcggactaatcacctgttcgtgcaccaggtggtaggctgccgtgggagagagctgctcacgggagataaacttgctgaggttgacggtgtcatcctgggtgagcagcttaatcatgttcctgcaggcgcgaaggatcagttcacggatggcagcccgatcaggctgtggttgcgcgaacaagcgttcggcttcctcggcatgcggacggaactgctcgccaataaaatcggcaatccactgggcgcaggcgaggtacaaatcttctttcgaaccgaagtagtaggtgatggcagcgatattctgcccggcctgggcggctatctcgcgagtggtggcgttcattccatattcaccaaactgcgccagtgcggcagcaatcagctgttttttcgcctgttcacccttgattgtcatggcaggattattcatcgcacagtccattcttaatcaaatgattgattaagattatgactccataggggagttgtccagtatggctaagaattttagcaacgccagtcacagggataatttatgcgctgtgtcacaaaaactgctacactccgctccctcatgacattgtggtttttgtcattttccttttcagtatctccctgaaaactacaccggtaacggtcggggcggttcggagtagttatgtctttcgattctttgggtttaagccctgatatcctgcgcgccgttgccgagcagggttaccgtgaacccacccctattcagcagcaggcgatccctgcggtgctggaaggccgcgacctgatggctagcgcccagaccggcaccggcaaaacagcgggctttacgctgccgctgttgcaacacctgatcactcgccagccgcacgccaaagggcgtcgtccggtacgtgcgctcattcttaccccgacccgtgaactggcggcgcagattggcgaaaacgtccgtgattacagcaaatacctgaacattcgttcgctggtggtgtttggtggtgtgagtattaacccgcagatgatgaaactgcgtggcggcgttgatgtgctggtggcaaccccgggacgtttgctggacctggaacatcagaatgcagtgaagctggatcaggttgaaatcctcgtcctcgatgaagctgaccgcatgctcgacatgggctttatccacgatatccgtcgcgtgttaacaaaactacctgcgaagcgccagaacctgttattctccgcgaccttctctgacgatattaaagccctggcggaaaaactgttgcacaacccgctggaaatcgaagtggcacgccgcaataccgcgtctgatcaggtgacccagcacgttcactttgtcgataagaaacgcaaacgcgaattgctgtcgcacatgattgggaaagggaactggcagcaggtgctggtgtttacccgtaccaaacacggcgctaaccatctggctgaacagctcaataaagatggcatccgtagtgcggcgatccacggcaataaatcgcaaggtgcgcgtactcgtgcgctggctgattttaaatcgggcgatattcgtgtactggtggcaactgacatcgctgcgcgcggcctggatattgaagagctgccgcacgtcgtcaactatgaactgccaaacgtacctgaagattatgtccaccgtatcgggcgtaccggtcgtgcggctgctaccggtgaagcgttgtcgctggtgtgtgttgatgaacacaaactgctgcgtgatatcgaaaaactgctgaaaaaagagatcccgcgcattgcgattccgggctatgagccggacccgtcaatcaaagccgaaccgatccagaacggtcgccagcaacgtggcggcggcggtcgtgggcaaggtggtggtcgcggtcaacagcaaccacgccgtggggaaggtggcgcaaaatctgcaagcgcgaaacctgcagaaaaaccgtctcgccgcctcggcgatgccaaaccggcaggcgaacaacaacgtcgccgccgtccgcgtaaacctgccgctgcgcagtaatcttttatgccgggctatgcccggcatcaggctgatgaacaaacgcaaaactgcctgatgcgctacgcttatcaggcctacgtgaactctgcaatatattgaatttgcatgcttttgtaggccggataaggcgtttacgccgcatccggcatttcacaacaagcacttgtcagcaatttgagaacacgggaaaaaatttatctgttttaccgcccataagccaccgagacgttacttctctatagccaattgttcgcgcaactccattaaaaggtagcccagtcgattcttgcccttaccatgaccaccgtctccccagtaagcatcgttttccgtatgctcaaccagttttgcgggcgcggttgccagcaagagcgcacgcagttctgcatgctgttcgaatttagcgcgaagtgcttttcgcatcacctgttctttgaccgactcccagtttttacgcagaggcttagaacgatcgcgccccatgcgtgcggcgaccataggggaagaaacccgacggatctcttcgcggtatttttcatcaaggaatttttgtgcctgaaaatagtgttctgaggtgggccaggttttcccgtcaaccttgatgggccaggcggcaaagttagaaaaatcaccgtagtcatcgctggtgctgtagaaatttatgatggtgtcttgcatgacgtgttggatcctttgtgctcgaacgggcattaaaccgcattatgttggtggttattgcgagccgctttccagaaacagaaaaaccattacccctgaaaaccgaaaaatgccacaatattggctgtttatacagtatttcaggttttctcatggcattaaccgccgcgcttaaagcgcaaattgccgcctggtataaggcgcttcaggaacagatccccgactttattccccgtgcgccgcagcggcagatgattgcggacgtcgccaaaacgctggccggagaagaagggcgacatctggcgattgaagcccccaccggcgttgggaaaacgctctcttatttgattcccggcatcgccattgcccgcgaagagcaaaaaacgctggtggtgagtaccgccaacgtggcattgcaggatcagatttacagcaaagatttaccgctgctgaaaaagatcattcccgatcttaaattcactgccgcttttgggcgtgggcgctacgtttgtccgcgtaatctgacggcgctcgccagtactgaacccacgcaacaggatctgctggcgtttcttgacgacgaactgacgccgaacaatcaggaagagcaaaaacgttgtgcgaagctgaagggcgatctcgatacttataaatgggatggtctgcgcgatcatactgatatcgctatagatgacgatctctggcgtcgtttaagtaccgacaaagccagctgcctcaaccgcaattgttactactatcgtgaatgcccgttttttgtcgctcgtcgggagattcaggaagcggaagtggtggtggcaaaccatgcgctggtgatggcggcgatggaaagcgaagcggtattgcctgacccgaaaaatttactgctggtgctggacgaaggccatcacctgccggatgtggcgcgggatgcgcttgagatgagcgccgaaatcaccgcgccgtggtatcggctacagctggacttgttcacgaaactggtcgctacctgcatggagcagtttcgcccgaagaccatcccaccgctggcgatccctgaacgtttgaatgcgcattgtgaagagttgtatgagcttatcgcctcgttaaacaacattctcaatctctacatgcctgccgggcaggaggcagagcaccgttttgcgatgggcgaactgccagatgaagtgctggagatctgccagcggctggcaaaactcaccgagatgctgcgtggcctggcggagttatttcttaacgatttaagtgagaaaaccggcagccatgacattgtacgtctgcatcggttgattttgcagatgaaccgcgcgttggggatgttcgaggcgcaaagcaaactctggcggctggcttcgctggcgcaatcttccggtgcaccggtgaccaaatgggcgacgcgggaagagcgcgaagggcagctacacctctggtttcactgcgtgggaatacgtgtcagcgatcagctggaaaggctgctgtggcgcagtattccgcacattattgtcacctccgcaaccttgcgttcgctgaacagtttttcgcgtttgcaggagatgagtggtctgaaagagaaagcgggcgaccgttttgtggcgctggattccccctttaaccactgcgaacagggcaaaattgttattccccggatgcgcgttgagccttccatcgacaacgaagagcagcatattgccgaaatggcggcctttttccgtaagcaggtggagagcaaaaaacatctcggtatgttggtactgtttgccagcggacgggcgatgcagcgctttctcgactatgtgacggatttacgtctgatgttgctggttcagggcgatcagccgcgttaccgtttagttgaactgcaccgcaaacgcgtcgccaacggtgagcgcagcgtgctggtgggcttacagtcatttgccgaagggcttgatttgaaaggtgatctgctcagccaggtgcatatccacaaaatcgcttttccgcccatcgacagcccggtggtgatcaccgaaggggaatggctgaaaagcctcaaccgctatccgtttgaggtgcaaagcctgccgagcgcctcgtttaacctgattcagcaggttgggcgactgattcgaagccacggttgctggggcgaagtggttatctacgacaaacgcttgctgaccaaaaattatggcaagcgactactggatgcattaccggtatttccgatagagcaaccggaagtccctgaaggtatagttaaaaagaaagaaaaaacgaaatccccacgccgtcggcggcgttaatgatgtgagtcaggtaaggagtcgtaaatggactatcgcaaaatcattaaagagatcgggcgcgggaaaaaccacgcgcgcgatttagaccgggatactgcgcgcggtctgtatgctcatatgctcaatggtgaagtccctgaccttgagttgggcggcgtattgattgcgctgcgtatcaaaggagaaggggaagcagagatgctcggcttttacgaagccatgcaaaatcacaccatcaagctgacgccgccagcaggcaagccgatgccgattgtcatccccagttacaacggcgcgcgtaaacaggccaacctgacgccgttgttggcgattctcctgcacaaactcggttttcctgtggtggttcacggggttagcgaagatccaacccgcgtgctgactgaaaccatttttgaattgatgggtattacgccaacgttgcacggcgggcaggcgcaggcgaagctcgacgaacatcaaccggtgtttatgccagtcggcgcgttttgcccgccgctggaaaaacaactggcgatgcgctggcggatgggcgtgcgtaacagtgcacataccctggcgaaactggcgacgccatttgccgaaggtgaggcgctgcgtctttccagcgtttcgcatccggaatacattggacgcgtcgcgaagttctttagcgatatcggcgggcgggcgctactaatgcatggtactgaaggtgaagtgtatgctaatccgcagcgctgcccgcagatcaatctcattgaccgtgaagggatgcgggtgctgtatgaaaaacaggacactgctggtagcgagttactgccacaagcaaaagatccggaaaccacggcgcagtggattgagcgttgccttgctggcagcgaaccgattcccgaatcgctgaaaatccagatggcttgctgcctggtggctacgggtgaagcggcaactatcagcgacggcctggcgcgcgttaatcaggcattttaattcttttctcagccggatgagccatgtcatccggcttttaccccaccgcaatatgaaattcctgcatctttattgaccttcccacgcccggcgtgcagcataaaaatacaacaaacacataacataaacaggagttaaccatggaaagtggtcatcgctttgatgctcagacgctgcacagttttattcaggctgtatttcgtcagatgggtagcgaggaacaagaagcgaaattagttgccgatcatttaatcgcggcaaacctggcagggcatgattcacatggtattggcatgatcccaagctatgtacgctcctggagtcaggggcacctgcaaattaaccatcatgccaaaaccgttaaagaggcgggggcggcggtcacgctcgatggcgatcgcgcatttggtcaggtcgcggcacatgaagcgatggcgctggggattgagaaagcgcatcagcacggtattgccgccgtggcgctacataactcgcatcatatcggccgtatcggttactgggcggagcagtgtgcagcggcggggtttgtctctatccactttgttagcgtggtcggtattccaatggtcgcgccgttccacggtcgcgacagccgctttggcaccaatccgttctgtgtggttttccctcgtaaagataatttcccgctgttgcttgattacgccaccagcgccattgcatttggcaaaacccgcgtcgcctggcataaaggcgtccccgtgccgccaggttgcctgattgacgttaacggcgtgccgacgaccaatccggcggtaatgcaggagtcgccgttgggttcgctgttgacctttgccgaacataaaggctacgcccttgcagcgatgtgtgaaattcttggcggggcgctttccggcggtaaaacgacgcatcaggaaacgttacaaaccagtcccgatgccattcttaactgcatgaccactatcatcatcaacccggaactcttcggcgcgccggattgtaacgcgcagaccgaagcctttgccgagtgggtgaaagcctcgccgcatgatgatgataagccgattttgctaccgggcgagtgggaagtgaacacgcgtcgcgaacggcagaagcaggggattccactggatgcgggaagctggcaggccatttgtgatgcagcgcggcagattggtatgccggaagagacgttgcaggctttctgtcagcagttagccagctaaaaaaaagcccgtccagtggcggacgggcaaacaagggtaacataggatcaatgagggttagagcatatgcgtctgtcggcaaacagacagggaaatacttgtgctggacgtagcgtaaacgcctgatccgtccaacggttcggattttgtaggcctgataagacgcggtagcgtcgcatcaggcatctgttgccggatgcggcgtaaacgccttatccgtcctacgaattacttataaattaccgcagtaccgcttaatttattgttgttggtggcggaagtgatgctgtatccactggcaccggctgccgcggctttctcagccagtttcgcttccagggcatcgagggtggatgcgccatcggcagaaaccacgccgattttattcatgttctgtgcctgggatgccgttaccggttccgccgcgaacacgccaaatgacagagttgaaagagccatagcagcaacaacagtattgatagttttcataattaatctctcgcaggtgatttttgtataagtgacgttgtttcgtcgatgtgatgagtatcacgtttttttacgagagataaaatcgaagagaattgaccgccttgttcaaataaattgattgatatctaacctactgataaaccatttatttgttgtacttatgaacttgttttataccgcgtggcagtcacagcagcgttaaaggcacggaatgacacgcaaaatacaaattatactcgctatgcatctcgccagttgtagttaacgtaactggctgtctttcgaacctctgcgattatatcctgtataagctggtttttgtaaatctttctcctgctgacaatgaatacataagcgcacgccaggaatggcttcccgacgggcctgcgggatgggggcaccgcactcttcacattcatccaggctttcgccgcgcggaatttcaccccgagcgcgggcaatcgcatcttcaattgtactgttgatctgttcgttgacggcgtcatcgttagcccaaccggatgccatatcgacctccccatatcaatacttgtacagttaagtgtagctaatccagggacgaactcgggcagttcaagcatcagatctccgaccattcccgcagcagattatgataaagattaagcagcgacaggatctcttcactttcgccgtagcggcttttcagcgactgaatattgttgtccagttcaaacagcatggcgcgctttttatcatcgcggatcatcgactggatccacataaatgatgccactcgtacgccgcgggttacgggtgtcacgcaatgcaggctgctggagggatacaacacgagatcgcctgccgggagttttacccgatgttgtccgaaggtgtcattaacgaccagttcgccgccgtcgtagctttgtggatcgcttaaaaacagcgtggcagaaaggtcagtacgcatccagccgttttgtggatggctgcgtactgcgccatccacatggaaaccataggtttcattgttctgatagcgattaaacagcggcgtggaaagggtacgcggcaaggccgcggcaaagaataaagcatgttggttaaccgcgttcagcacctcattttgcagggcggcgtataacgtgctgcgggtgtcgacctgttgattgttcttaacttgcgcaccttgtgcgccggtggtgacgcgtccatccacccattcggcttgttccagttgttcgcgaaaacgagcgacgtcctgtggcgataacacgccgggaatgtggtacatcatacaatttctccaaaaagtggggcctgcgccccacatctgaatcagaaatgcatattggctgtgagcaagaaggttcttggctcgcccgggtgataacggtagccgctcttgttgattgaggcgacgtaatcggtatcaaacaggttgtaaacgtttagctggaagtcgagattgcgattaactcgataccccagtttggcatcggcgacccagtaaccttcggtaaacgctggcgttcccaccgcgccgtctgaacctttatgcatactgccgatatagcgtgcgcccgcgccaacagagatatcgtcggttgcctgatattggctccataaggtgaaggcgtgctccggggtatacggcagcgatgaggaaccatcctgggcaacatctttgccgtttttgatggttgctttttgctgggtatagccgccaatcacctgccacgcgggagtgatattcccggccacggatatctcatagccttcgacgcgtttcttaccgtattgcgagtaagttccgtcatcattttgctcaacttcattttcgatatcagtgcggaacagcgcggcggtgagcaacagacgtttatccagaacctgccatttggtgccaatctcgctggtgttggctttttgcggtttaaaatcggtgcggttggcactgttaccgctgccagactgcgcaagggcgaagttgttgccgcccggaggctgctgggaaacggcatagttaatatagacattgccgttttccgtcaggtgatacagcgccccggctttccagttcatcagattgcccgacttggcggtgtcgacggtggtgaccggagaaccttttgccacaccagttgggcaggtgatggcaccgcgtccgctgccgccgcaggcggtggcactgtcatattcagtatgataattatccagacggatcccgccgttcagctcaaaatcacgggtgatttgcagcgtatcaaaggcgtaaattgcgaaggtatccgtctgaccattggcgtttgcgccgttgcgcgtcaggccgccgggatgaatgctgctgtcaggatgataaatatttaccgcgggtaacgtcaccggattaacgccgtagttagtctgcgtttcacgggtaaattccacgccggtactgacatcatgaccgatagaaccggtatagaacgtcgaggtcaggttggtctggttggtgagaattttattactcacatctttggtattcgccgtgcgtgaccaggtccagctattcacatcgctggtgggctgagtaatattcgacgccccgcccataatcgccgtcatcaggtaatcctgctttacgcgcgaccaacgggtagtattgcgaatggtggtgttatcgttgatgtcgtgctcaaaacgcatggtggcggtgtcggtggtcgaatcgtcgtaatcggaatccgtgccgtaaaagttatgagtatcaacttttccggaatgattcagggccgccgttcccgcagatggggcagaatagcccggcaaaccgatggtcggaatgccgccgtctggcgtgttgtgctgggtgacatgcagataattaagatacaaacgattcgctgtaccaaggccaaaagcgacagaaggggcgacgccgtaacgctcatttttgactttgtcgcgtccggcatcgtgcgttttttcgcccattacattcaggcgcaccgcggtggtatcaccaatgacctgattgacgtccagcgtgccgcggcggaaccaggcgctgccaatactggcggaggcgtcaatgccggaatcattgcgcggctgcttgctgatcatattgatcgagcctgtcggtgcgctgcgcccgtagtcggtgccggacggccctttaatcacttcgacctgctcggtattgaaggtgtcgcgcgagacgctgccgatatcgcgaatgccatcaatataaatactgttagaggtatcggcaccacgcatataaatggcgtcgccagtggtggagttaccgttctcacccgcaaaaaacgcacccacgccggggtaatgccgatcagttaaggatcagttgaccgatccagtggctgtgtaagaatccggaaacgctcacttgtttccggatttttttatgcacattggacaggctcttgatctggtatcccgttacgattctctgcgtaacccactgacttctctgggggattacctcgatcccgaactcatctctcgttgccttgccgaatcaggtactgtaacgctacgcaagcgccgtcttcccctcgaaatgatggtctggtgtattgttggcatggcgcttgagcgtaaagaacctcttcaccagattgtgaatcgcctggacatcatgctgccgggcaatcgccccttcgttgctcccagtgccgttattcaggcccgccagcgccagggaagtgaggctgtccgccgcgtgttcacgaaaacagcgcagctctggcataacgccacgccgcatccgcactggtgcggcctgaccctgctggccatcgatggtgtgttctggcgcacaccggatacaccagagaacgatgcagccttcccccgccagacacatgccgggaacccggcgctctacccgcaggtcaaaatggtctgccagatggaactgaccagccatctgctgacggctgcagccttcggcacgatgaagaacagcgaaaatgagcttgctgagcaacttatagaacaaaccggcgataacactctgacgttaatggataaaggttattactcactgggactgttaaatggctggagcctggcgggagaacaccgccactggatgatacctctcagaaagggagcgcaatatgaagagctcagaaaactgggtaaaggcgatcatctggtgaagctgaaaaccagcccgcaggcacgaaaaaagtggccgggactgggaaatgaagtgacagcccgcctgctgaccgtgacgcgcaaaggaaaagtctgccatctgctgacgtcgatgacggacgccatgcgcttccccggaggagaaatggcggatctgtacagtcatcgctgggaaatcgaactgggatacagggagataaaacagacgatgcaactgagcaggctgacgctgagaagtaaaaaaccggagcttgtggagcaagagctgtggggtgtcttactggcttataatctggtgagatatcagatgattaaaatggcggaacatctgaaaggttactggccgaatcaactgagtttctcagaatcatgcggaatggtgatgagaatgctgatgacattgcagggcgcttcaccgggacgtataccggagctgatgcgcgatcttgcaagtatgggacaacttgtgaaattaccgacaagaagggaaagggccttcccgagagtggtaaaggagaggccctggaaataccccacagccccgaaaaagagccagtaagttgcttaactgactggcattacccacgccggggacgtttttgagcgcgtcggtaaggttggttgcgccctgatctttaatcacttgttcagaaattaccgtcatcgtgcgggtagtatccgctaccggacgcgagaatttcggatcggcagattgttgtggcgcataaagcgaaggcgttgatgcttcgacaaccagcgtgtcatccgcgttagtttgcccttcggcggcgagtgcctgagccacaggcgtgatgccaatacaaagaccggcaaagaacgtgagcgaatgaaattgtctggcagggaaattgcgattgttttccattttgcaggtgactttttcttatatgttgaaattttcactgccacgagaaagcctctctgcggatgcgatgccactgttaatcccgtgatagtgctcgtgaaagtgataataattttgataagcattatcacttggagcgattttctatcacccattgcgcgaaaaagaaatacatttatttacattgagttcatatttgatgttttttgattacaaaacagacgaaaactgcatccagaggcgaatgcagttacgttggtggggttatttgtagatggttgcagtaccgaacatctggtcatttccgcctgcggaattaatgacataacctttcgcgccttgttcgcgcgctttttctgccagtttatcctccagatcgcttaggtttgatgcgccagttgccgaaacggtaccggcgggccgtagctgaccgctgtccaggttactcatcggttgcgcggcataagccgtgagagagattccgctcaggacggtggcaatcagtagtgtgaggcactttttcataatgacatcctcataaatacaacgggtagtgcctgataagtgtaggtcgcctgcgcgatgcaaatgacgcaaaaaattgacagagatgtgcttattttttgaacgatatatttttacaaaataagacaaatcaatgacatgcataatgctgatttttatgatgaattgccataaaccatagccatgttaaggttttggggaatgataaacgcagccagatatttaccctgtcgcgttatgcgggtatcttacgccgctgcttaaaggagaatgctatgtccgcccagaaaccggggttgcatccgcgcaaccgtcatcacagccgctacgatctcgccacgctttgtcaggtcaatcctgaactcaggcaattcctcacgcttacacccgccggggagcaaagcgtagactttgccaatccgctggcggtgaaggcgctcaataaggcgttgctggcccatttttacgccgtagcgaactgggatatccccgacggttttctctgcccaccagtaccgggccgggcggattatattcatcaccttgccgatttactggcagaagcaagcggaacaattccagcgaatgccagcattctggatatcggcgttggtgcgaactgtatttatccgctgattggcgtacatgaatatggctggcgttttaccggtagtgaaaccagcagccaggcgttaagcagtgcgcaggcgattatcagttctaatccggggcttaaccgcgccattcgtctgcgtcggcaaaaagagagtggggcgatttttaacggcatcatccataaaaacgagcaatacgacgcgaccttgtgtaacccgccattccacgattccgccgctgcggcacgggcaggtagtgagcgtaaacgccgtaacctggggctgaacaaagacgatgcactgaactttggcggccagcaacaggagttgtggtgtgaaggcggtgaagtcacctttatcaaaaagatgattgaagagagcaaaggcttcgcgaagcaggtgatgtggtttacatcactggtatctcgtggtgaaaacttaccgccgttgtatcgtgccctgacggacgtgggcgcggtgaaggtggttaaaaaagagatggcccaggggcaaaagcagagtcgctttattgcctggacctttatgaacgacgagcagcgccgccgttttgtcaatcgccagcgttaaagcgttggttcccccggcggtaacggttcagccggggtcgcgcccggagcaggcagcacctgataagtctgcactggcgcgcgaacgcccgccaggtcgaaatgttttttcacctggctgtcgagggcaaagcgtaccgtccactgtttgagtggcagcgtggtgaacgaaacacgcagtgtaaacgcggtattgcttaagccgacaatcccggcaaaattcggttcaccaataatcagcccgcgaatttcttcgttttccattaattccgctaccgcatctttcagtgcctgattggctttatcagcatcttcatggcgatcaacatcataatttgccaccaccgaaccaatgccgcggacaaagttagcaaaggtggttatcgaagaccacggaatgatgtgatacgccccggtatcctgtcgtacgcccacggagcgaatcgacatccgttccactgtgccggtcaacggcccgatagtcaccaaatctccagtgttcatgccgttttcaaactgaataaataccccggtgataatatctttcaccagcgtttgcgaaccaaacgagatagccagacctaatgccccggcacctgccagcaatggcgcgatattgacgccgatttccgacaacacaatcatgatggtgatggtactgataatcaccgccagcgcgttacgaaacagcgtaagcagggtacgcgtgcgggcgctgggtagcgggcggccatgaatatccgaagccagccggttttcgatcaaactggcgagcaccgtccagccaaccgccgagaagaaaagaatgagtgcgatacggatcaggatatctacggttttctgccccgcgccgttttgcagccagttccagaaatcgaacaatccccatgcgctcaacagcaacattaccgccacgcagactgtcagaatacgcgccgttttcagcgccgccgacagccagccattcaaccgtttttgcagctccggatagttacgctgagtatgtggcgagagagtgatggttttcgccagccagcgggaaaacataccggaaacaaacgctgcgataccaataatcgccaggctgcgcaccgttgcacccatcataaatttcaggctgttgcccggatcgaacaacgaaaagaaaaacagcacgataaaataggcgcttgccagccagtgccacaccagcgcaaaggcgcggataaacaggctgaaaaaggccagcgaatgctccgcgaagttgagcaaatgctgggtaatctcttttttattacgaaagatcaggtacaacgcccagacggtcatgcacagcataatgatgacgttcgccagcgcacctatctgtacattcacctgattagagataatcggcacggccacaatcaggccataacctatcaaactgcttaaccagctcaggcgacgactccagtaacgggcgctctcgtcctgaatcgtgaacgggcgcagctccgccacgtttgggcaaaaaatcaggcgtagtacggctttgaaaaattcaatgagggcaaaggcgttgagaaacaaactttgttggaaagcgatggtgcgactgcctgcattcaggttgtcgcttaatacctggccgacaaataatgtcagggccagtaacagcaggtcgataataaacgccccgataatcatcgccggaagctgcaaccagttgctgcgctcacgatttttttgccgcgcccactgacccattttgcgatacagcggcagtgcgcacaggcgaatcagccagtaaaaaccaaacactaataccgctaacattgaaaaatgggtcagcgcattgctgaaggtttgtggattaaacggcttatgcggggagccggtgatattgcgataaagttgcccgaagcgggcggaaagggcttcaccataatggcggctgacttcggtgaccttttgcagcacggtttgctcttcgaccagcgtcggcggcactatttttggtaccggttcagcagggggcgtagcggcaacggtgcgcaactggtcgatcaactctttacgcgaggtgtcattatccagcacatccgccagtgcgccataggccgcttttttttgttcgatatccggttccggggccggttcagtcgttgagtccgttgtcgttgtggttgtaacgccgggtatggataccgcgtgggcaggtgcgcccagcaggcagaagaggatgaacaggatccaccgcatgactcctccagtgagaaaatagagcaaaaagataagtatagatgctggaggaggggcgattttaaatgagaggaatctggtgtgcctccctttcgggtgaaagggaggaagggatattaagcaggttgctgacaacgtgcgggcttttttgccggatgcggcgtgaacgccttatccgtcctacaagttcatgcaattttaataagttgccagatatcctgtaggcctgataagcgtagcgcatcaggcaatgtgtcttattaagagacgtgctgcaaaaattcctgcaagcgctggctcggcgggttcttgatcaacacctgcggattgccatcttccgcaatccggcctttgtcgataaagatcagccgcgaagctactttctcggcaaaaccgatttcgtgggtcacgatcaccatcgtcatcccttcttcagccagatcctgcataaccttcagcacttcatggcgcagttccgggtcaagagcggaagtcggttcatcaaacagcatcattttcggcttcaccgccagcgcgcgggcaatcgccacacgctgctgttgaccaccagaaagttcggaagggtagtgatgtgcacgttctgccagaccgactttcgccagcagctcacgtgccagtttttccgcctcttctttgttcgcgccacgcacgcgtagcgggccaaacatgacgttttccagcgctgtcagatgcgggaagaggtaaaactgctggaacaccatacctgcttcctggcgaatcaggcgctcgtcaactttcggatcgttaaccttcaggccatcgacaatcagatcgccggaggtgatttcttccagtttgttgatgcagcgcagcagggtcgatttaccggaaccggacggcccgataatcaccacgacttcgccctgggcaatgttcaaatcgatattgtgcagcacctgggttgggccaaagtgcttggagacgtttttaaattcaatcacaggattttcatccttctttccagacgacgcagaataaagctcagcaccagggtaataatcagatagaacaccgccacggcgctccagatctcaagggcgcggaagttaccggcaataatttcttgcccctgacgggtcagttccgccacgccgatcacaataaacagcgaggtgtctttaatgctgatgatccactggttacccagcggcggcagcatacgacgcagtgccagcggtaaaatgacgtagcgaatggtttcccaacgtgaaagaccgagcgccagtcctgcttcacgaaaacctttgtggatagacagcaccgcaccacgcgtgatttccgcaatatacgcgccggagttgatcatgatggtgaccaccgccgcagtaaatgggtcgatgcgtaagtcgttaaacgccatcggcagggcgaaataaataaacatcacctggacgacgataggtgtgccgcggatcacttcaataaagaccagcgcgacgtggttggctatccaacctccgaaggtgcgtgcaaaacctgccagcaatccgattaccagaccgcctgccagaccgaggaccgaaatccacagggtcattttggcaccttcaatcagaagcggaatggcaggccagatggcactccagtcaaactgcatatgttgttcctgttaccgtggtgtaaataatcaaattcagggtaattaatggccccggagcgggtttgcgcccctcaccctaatcctctccccataggggagagggaactgccagtgcgttttacaggtgtagcgttattatttcggttcagtaccgaaccattttttgtagatttcgttgtaagttccgttctcgcgcagggttttcaacgcgccgttgactttgtcacgcagctcgtcgctacctttcgggaacgcaataccgtattgctgcgcttccagagagtcacctaccgctttgaactgaccgttaccggcggttttgatgaagtacagaatgtttggcgtatcgtgcagaacggcgtctgcgcggttggtgcccagttccatataggcgttatcgatgttcgggaactgacgcagatctttagttttgatgtttgctttcgcgtaatcaacggagccagtaccgctcttcacagcaaccactttcccgtcgagatctttcacgcttttcacatcgttattgttagctttcaccatcactaacaggccgcttttgtagtagccgtcagagaaatcgatcgcttttttacgctcgtcggtgatggtaatgcccgccagcgccagatcgacgtttttggtttgcagtgccggaatgatcccactgaaatccatcggcttcagttcgtaatccagcttcagctctttagcgatggcagcccacagatcaacgtcaaagcccacatatttatcgccctgtttaaattcaaacggaacgaaggcggtatccgtcgcgacaactaattttttatccgcggcatgagaagaaaccgcaaaagccagggtcagtgcagccagtgaaacttttaatacagacttcatagcatttccttttttctatccacgggacgatcccctgcgtgacattcacatatatgaaaaaatcgtgccagttttgcaactccttgatttttcgagatgcggcaaaaacgtgatgcacgatttatagggcaataccctgaagatgcaccattctggggcaccaatctggtgcgctaaaattgtgcactcaacacagtgattatttagcgtaaaacctgatgaaaaaacaatctttatgtaacgattgtgtgatgatgtggatacaaaaaatttacttaatcagctggagatagcagatggatgcactaaataagtgcgttgaggtgggctgcaaaacaaaacggcctcctgtcaggaagccgcttttatcgggtactaaagttctgcaccatcagcgatggatttattcgatgttagactcgataaaccacaggaatttatccaggtcgcgagacgcggcggtcaggatatctgcggtgtcgtcatctttcgcttcgccaatcgctttgcgtacgtcattagcgacgattgcgtaacggtcagccagttctttcaggtgatcctgaacgttgtggatgtccagcgggtaacttttcagcggggttttgctgttgataacttgagtggtccccagagctacaccgcccagctgcactgcacgttctgccatggtatccagatgatcgatcagtgcggtgcggaagccatccagcatttcatgtacggcaatgaagttagcgccgcgcatgttccagtgcgcttgtttggtaatcaaagaaagatcaataaactggataacctggcgattcagcaactctactgttgcttttttctcgctgtcggagacatcgttgcgggtataaagcagattggtcgcttttgatttaactaatttagcggtactcataatttcatatcctcttgatgttatgtcccagtaattaacgagactaagtatagcaccggctatgtgttccgctattctggctgttcctatcacactaatagtggtaacaagcgtgaaaaacaaaactaataaagattcaatgagttagatatattgataagaacaattcttatttatctgctcgccaggaattttcggaataaatatgcttttgcataattcgatatataaagacggtgtagaggaaaagtagcgagaaattctgcatggttatgcataaccatgcagaaatgtaaatttaattaatgtctaattcttttattttgctctctttgcgtactgtcagcgtagaccccattgaagcggcgatgatagcgccgagcgccagtagctgtatgggtgtcagtgtttctccgaggaaaatcatcccggaaacggcagccagcgccggttccatgctcatcagcgtaccaaatgtccgtgttggcaaacgggtgagggcaatcatttccagcgaataaggcagagcagtcgagagaatagcgacagccagacccaatggaataaccgaccagtgccagagtgcttcaccagcctgaagcgctccaattggcacgaaaattaacgctgcaatcaacgaaccaattgccaccgtcgcagggccatgttccgctcctgcgcgttgcccacttaaaatgtaaatagcccaacaagccccggcccccagtgccagcgcacagccggttaaatcgacatgggaaacgtcttgccccagcggtagcaggaaccacagaccaagaaccgccagcacaacccagacgaaatctaccgggcgacgagaagagaacagcgccaccgccagtggtccggtgaactccagcgccaccgcaatacccagcggtactgtctgaatagaaagataaaaaagataattcatcccacccagcgaaacgccgtaaaacaacagcggtaaccgttgctctttggcaaagcgcagtcgccatggcttaaagaacgcgatgaggatcagcgttcctaatgccagacgcagcgcagtgacacccggtgcgcccaccagaggaaaaagtgacttagctaacgaggctccaccctgaatagacgccatggcaacgagcaatatgactattggtaaccagaccggcattttacgtaatgaaccaggcatcctttctcccacaaatatctagacttaagtaaagcgtggagtgtactggatatacccaatgctggttgagcatttgttgaaaaaattttcccccgttttgactaaaatgcgccaggattgatggaatcattagtctggtgattaggaataatctggatgaatgacagggaaaacatgcgtaatacttacgcagttctctgaaaaagtgatttaaatttagatggatagcggtgtatggaaacgttctgttacatgaaatggcccgttagacatcacaaatcgcgaagagtttcccattaatttttgatatatttaaaacttaggacttatttgaatcacatttgaggtggttatgaaaaaaattgcatgtctttcagcactggccgcagttctggctttcaccgcaggtacttccgtagctgcgacttctactgtaactggcggttacgcacagagcgacgctcagggccaaatgaacaaaatgggcggtttcaacctgaaataccgctatgaagaagacaacagcccgctgggtgtgatcggttctttcacttacaccgagaaaagccgtactgcaagctctggtgactacaacaaaaaccagtactacggcatcactgctggtccggcttaccgcattaacgactgggcaagcatctacggtgtagtgggtgtgggttatggtaaattccagaccactgaatacccgacctacaaacacgacaccagcgactacggtttctcctacggtgcgggtctgcagttcaacccgatggaaaacgttgctctggacttctcttacgagcagagccgtattcgtagcgttgacgtaggcacctggattgccggtgttggttaccgcttctaatcactttggtgatataaaaaatccgcctctcggggcggatttttgtttttaaggtttcgggtcgaaaatatcggttccgagatggttgtaatccaccttctgtaactggaagttggtgatgtatatcggcccggctttcttctcagatataaacgggtatttgatgttaatttccttcgctttaatccccgtccactgggagaaaaagcctaagaagtcattggctgagcggcgggctttaatcacacgatgcgctttatcgtcgctggaaatgaccataaaaggcacctggaaattttgctgatatttatcatcatgggcaaggtattgcacgtctttaccgcgctctttaaaggccagaccgtggtcagaaaagtaaaccagcgagaagctgctgccgctgttgcgtaactgatcgtacagcttgcgcagtaaatcgtccgtttgcgtcatggtatagagatagcacgacgtttctttcgattgcacaaaggtttcgtattttccttgtgtcctgtcgcaggcctgcggatgtgagcccatcagatgtagaacaatcagctgcggttgcgagtgctcttgcgccagcacttgagcggtcatatccagtaacgcttcgtctttggtgtttttatctgcttcaaaattaccttctttcaggaagtacacttcatctgctcgtttggcgatgctggcgatagcggtatcgtattcgccgatttgaccctggttggaaaaccaccaggtctggaagcccgcgcgatttgccagggtgacaaagttatcctgaaactgtggtttgccatcgacaacgcgattgagcgttaagccaagcgatttctgcgtggagccactggcggcaatgtagtcagcaaatatcaaaccgttaacgctgctggcaaacggggtattgtcccagtgaccgccaaaggcaccgagggcatcgcgacgcgcgctttcaccgatcaccaccacataggtctgatacttcggcttaacggcagtgaccgtccaggtatctttcattccggaaagttttgccatccgttcttgctcttcaatcacctcgttattattgacgatgacatcctgagcaaaacgaaataccggatagccagtatctttcagtttaaatacgccaccccaggccaggttttgcacgggagcaacaaaaaatgtcgccacactgaataccagacacaggctgtcgaaggtattccagcgcgctttttcattctctttttttcgcctgattgctattacgccgagcgcaaaaataaataagccgaccaggtagctgtaccacggaaaaatcgtcaggatttcggtcgactcttccatattggtggagtgcaatgccagcaatgtattgaaattaggcgcgccgtaggcctgagcaaaagggaaataacaagccgccaccagcgaactgacaccgaccagaactttttgtacgcgaggcaatgttcgccatagcaaaagcaaaatagccgtaaacgcagcggtgtagagcaaactgaaggggtaacctaagccgaggttaattaatagcgactgtaaaaagtagaacgcagtccacgggctaaatacccggctacgggtaacaagcgattctttgagggttaaattcatatgccactatcgtaacaaacgccatgtgcttaccctggcgtcaagggtcaatacctgcaagagtgcgtgaagagtggaaaggggtccgcatccgcgagccgcaatatacgcagggctgcaagaagatagagcgagccgccgttcaggtcaactactgacgaacaaatcttttgcgaaggggattgcaaatccgacaaaaagtggggtttttcagaccaaaacgcgttatgcctgcatgaaagcaggagtgaagcggcgtaccgcgacgccgctatttatcggaaggtttatcttgctgcggtttgttgttgaccatatcgcacaacatagagagcagcattaaccgtactttaaagggagaatgactaaacacgcgcatacacctcttgaactcattcataagacctcctgacttgctaatcccgtcgatccttgagggatgattgcattacatacagatatagcacaggctatattatatagctattgctaaaacgttaattttttgtaccttcgcaactctggtttacaatgtgcgcacgaaatgagaacgctatgtatgcgtcaccataatgaggaagcacaatgagtcgtcgcgcaggtacgccaacagcaaaaaaagtgacgcagttagtgaacgtggaagagcacgttgaagggttccgccaggtcagagaggcgcatcggcgcgagcttattgatgattacgttgagctgatttctgacttgatcagggaagtgggggaagctcgtcaggtggacatggctgctcgtctgggagtttcgcaaccgacggtggctaaaatgcttaagcggctggcaaccatggggctgattgaaatgatcccctggcgtggcgtgtttttaacggcagaaggagagaagctggcgcaggaaagccgcgagcgacatcagatagtcgaaaatttcttgttggtgttgggcgtcagtccggaaatcgcccgtcgcgacgcggaaggcatggagcaccatgttagtgaagagacgctcgacgcttttcgtttgtttacccagaaacacggtgccaaatgagcctgccttttttacgcacgctgcaaggcgatcgtttttttcagttattaattcttgttggtatcggattaagctttttcgtgccctttgcaccgaaatcctggcctgctgctatcgactggcacaccatcatcaccttaagcggcctgatgctgctgaccaaaggtgtggagttaagcggttattttgatgtgctggggcgcaaaatggtgcgccgctttgctacggagcgtcggctggcgatgtttatggtgctggcggcggcgctgctttctacctttctgaccaacgatgtcgcgctgtttattgttgttccgctgactatcacgctaaaaagactgtgtgagatcccggttaatcggctgattatttttgaggcgctggcagtcaacgctggttcgctactgacgccaattggcaacccgcaaaatattcttatctggggacgttctggtctttcgtttgccggatttattgcccaaatggcaccgctggctggcgcaatgatgctgacgctcctgctcctgtgctggtgttgtttccctggaaaggcgatgcaataccatacgggggtgcaaacaccggagtggaaaccgcggctggtgtggagttgtctggggctgtatatcgtctttctgacggcgctggagttcaaacaagagctgtggggactggtgattgtggcggcaggctttgcgctgctggcacgtcgcgtggtgctcagtgtggactggacgctgctgctggtgtttatggcgatgtttatcgacgtccatttactgacccagcttccagcgttgcaaggcgtgttgggtaacgtgagtcatctatctgaacccgggttatggttaacggcaatcggtttatcgcaggtgatcagtaacgtgccgagtaccatattgttgctgaactatgtgccgccgtctttattactggtatgggcggtaaacgtaggtggctttgggttattacccggatcgctggcaaatttgattgcgctacgtatggcgaacgatcgccgcatctggtggcgtttccatctctattcaataccgatgctgttgtgggcggcgttggtgggatatgttttgttagttatactcccggccaactagggtctggcaaataaaaaaggcggattatgagtccgccttttgctttaagttttgaagattaattcagacgaaccggcatcccggagcggtttttaatcgcttcatcaagaacaacctggtcaacatctggctgaccggtcactgtctgcacgctcttcgtcagggtaattggcacaatttcctgaccttcaaactgggcttcggtggtagacagcgggttatggacttcaatataacggctgccgtctggctcggtggtcgcttttaccggctcatcaataaactgtacgcgggtaccgaccggtactttctcgaacaggaatttgatgtcttcgttacgcagacgcacacaaccatgacttacacgcaggccgataccgaagttggcgttggtgccatggatagcatacaggcgaccgatatagagtgcatacagccccatcgggttatccggacctgccggaacgacagcaggaagcggttcgcccgcagcgcggtactctgcgtgcattttggcggtcggcgtccaggtcgggcctgcttttttacgctcaactttggtggtccagttgataggcgtatctttgcctaactgaccaatgccgatcggcagcacgataacggtgttggtccctttcggatagtaataaagacgcatctcagcactgttaatgacgatgccttcatgaacggtatccggcaggatcagctgctgcggaatgttcagtacagtaccgcctttcggcaggaaggtatccacacccgggttcgcttccatcatattggaaagccccatctggtactcggcggcaaaatactccagcggctgagtgttaccttcaggaatggtgatcacctgattctgaccaaccaggcgactcccgtcggttggcagaggataagttaccgcagaggcggtactgcaaaagccgacaacagcgaaggccgctgcgaataatgttttcaatttcatattcatgttaagcgagattttgtgcctggcaggccattgggttgagaatattagagtattggaagcgcattataagttcattccagctcacagtgaaatcagatgtgtacgaaatcacattttttgcctttggcttgagtgtagaccttaagcgaggagcaggatcttctttcagacttatggcataatgcgcggtttgtcatatctcttttcaggatacgcctgtgttagtttccagtaacgtcaccatgcagttcggcagtaagccgttgtttaaaaacatttccgtcaaatttggcggcggcaaccgttacggcctgattggcgcgaacggtagtggtaaatccacctttatgaagatcctcggcggcgaccttgagccgacgctgggtaacgtttccctcgatcccaacgagcgcattggtaaactgcgtcaggatcagtttgcctttgaagagttcactgtgctggatacggtgatcatggggcataaagagttgtgggaagtgaagcaggagcgcgaccgcatctatgctttgccggaaatgagtgaagaagacggctataaagtggccgatctggaagttaaatacggcgaaatggacggttactctgcggaagctcgcgccggtgaactgttgcttggcgtgggaattccagtggaacagcactacggcccgatgagtgaagttgctcctggctggaagctgcgtgtgcttctggcgcaggcgctgtttgctgatccggatattctcctgctcgacgaaccgaccaacaacctcgacatcgacaccattcgctggctggaacaggtgctgaacgagcgtgacagcaccatgatcatcatctcgcacgaccgtcacttccttaacatggtctgtacccacatggcggatctggattacggcgagctgcgcgtttatccgggtaactacgatgagtacatgacggcggcgacccaggcgcgtgaacgtctgctggccgataacgccaagaagaaagcgcagattgctgagttgcaatctttcgttagccgctttagcgccaacgcctcgaaatctcgccaggcaacttcgcgcgcgcgccagattgataaaatcaaactggaagaggtgaaagcctccagccgtcagaacccgttcatccgttttgaacaggataagaaactgttccgtaacgcgctggaagtggaaggtctgaccaaagggtttgataacggtccgctgtttaaaaatctcaacctgctgctggaagtgggtgaaaaactggcggtactgggtaccaacggcgtcggtaaatcaacgctgctgaaaacgctggtgggcgatctgcaaccggacagcggcaccgtaaaatggtctgagaacgcgcgcattggttactatgctcaggaccacgaatatgagtttgaaaatgatctgaccgtgttcgaatggatgagccagtggaagcaggaaggcgatgacgagcaggcggtacgcagtattctcggtcgtttgctgttcagccaggacgacatcaaaaagccagctaaagtgctttccggtggggaaaaagggcggatgctgtttggtaagttaatgatgcagaagccgaacattctgatcatggacgaaccgaccaaccacctggatatggaatccattgagtcgctgaacatggcactggaactgtatcagggcacgctgatctttgtttcacacgaccgtgagttcgtaagctccctggcgacccgcattctggaaatcaccccggaacgcgtgatcgactttagcggtaattacgaagattacctgcgtagtaaagggatcgagtaagtgattatccgtcaccccgatactgtcggggtgacggcggctgatgacaaatgcaaaatagcctgatgcgctacgcttatcaggcctacgcagtacctgcaatatattgaatctgcaggactttgtaggccggataaggcgttaacgccgcatcaggcattaacaaagcgcatttgtcagcaatctgagtaacgtcgaatcgattttcttaatcccacatcaattcacttccattaattctcaaacatccatgcccaacgctcgcttaccgtgaatgttgaggtcggcaagcgtaaagcgtccttcccagtttgtttcatagtcctcgcgcgggaagtcgcccggcgatgcgcctttttccagtgcggccttcaccttgtgcgcgtaggcaagatttttctcgcacatcggtgccgcaggaatgtacatcacgttgccccaaccttgttgattttcaacgggggcaacggaatggatgacgtcgcagtgccaccagacggagtctccggcttcgagttttggaatgctggttaacgcctcaatcaacagtggatgccattgctctgataccggcaatactcttccgggcgctacgccgcacagttcatcctccggcacatcatcaagcagcggacgtaacagtacgtacgccatagcttcaggaatgggcacgacgtgcagcagcccctgaccaggcagcatatcagagagcgctgtccagccctggaatgtccgaaacacggaacatttggtggtgttgtccaccgtgtactcttcaacttccgtacgatgtgccgcatgccagggatcatattgcgccagattgccattaaagacgttggcgaaaacgcgctgatacgctggaagcagccagcgttccagtgccccggagtcggtatgcgctccaagacctttggaggtcgttccgggcggacggcggcggatacggtcagggtagatgacgctcacatccgggttaaaccattgctttccatcactttcaaatgtccacagacgattgagaaacgactgcgcattcgccatttcttcactctggcgggcctgcatttgcgcctgcgaccagtagatggggtaaatctcgggacgtgaagcgctgagcgtcccgaagaaattatcgccggggcctttgtagacctcgtcaaagcggttgcggtccagatagtccagcatcgactgatcccagcctagcgcttgttcgcgggggaaatggccttttatcaccgcacaaccgcgacgtttaatctgttcgcgctgctctgcagtaacatgacctgctttgatatcggcataagacagcaccggccagacggcatcgccctgtgctttgagtgcgttgatttcagccactcgcgtggcaatgtcatcgcttagctgattaaagatctgctggacgtcgccaagctgcgcccgcagcgcgtgcttcatctgacggatagctgctttgtgatcggcaggcaatgtgtcgctggtaaaagtagaagccataaccacctctcattaactttcattcgaaaccattctgatttgcatgtgacaatataagttataaataagttaatgcaagtttaatgatttgatgtgatgtacaggatgtaaaaagaagggaaaaccggagcgcacggctccggtagagaggtcagctgttaaaaggggatgtgttatccagcaccgcctgaatcacattcagcgcgccttcatgattattatcatcggtagcgtaacgggcgatttgtttaatgttttccgcagcattgcccatcgcaaaggaataacgcgccattttcagcatctccgcatcgttaccgctgtcgccaatcgctaccacattttgcggtgacagatcccagcgtttcagtaaccgcgaaataccgtttgctttatgtagaccgggaataatcaggtcgataaagccaaaaccactggtaacgggtttcataatgccatcgagcgctacgtgcagtttgtcgatcactaacgggatttgttcatccggcaggttgagcgaaaacttgaacagtacgtcgtcaatctcctgataatcttttacaggtttcaggcgatggtagtgttttgccatcagtgcgacaaatgcttcgggggcattttcgctgacatatgcactttgcagaccgcaggcgacaaaattgagttgcttatcttttagcaactcgccaataacaatccgcgattcatgtcgggtcagttcgccgtggaacaactgcttgccatgttcgtaaaccagtgcgccgttttccgcgacaaaagagatctcatcctttagctcaggaaagaatgaaataagctggtaatactgattaccgctggcaacaacgaacttaatgccgcgctttttcagttcctgatattgcgccataaaacgtggttggttgtacgttttggcgtcgttaagaaaagtaccgtccatgtctgtgacgataacttttacgctcataggtgtgctcctggctcgaaaatgaaaccgtaacagtgtaataacaatgtgacgcagagcacaaattatatttcgaatgaaagtaaggatgaaattgatgatgtgaatgatttagcccggcgacgacgccgccgggccgaggagattacagcatatgttcagtacgggcgatgatatcgtcctgagcgtctggagagagcgcggtgaagaacgcggaatagcccgcgacacgcactaccagatcgcgatactgatcgggatgttttttcgcatccagcagcgtttcgcgggaaacgatgttgtactgaatatgccagcctttatgcacttcaaagaaggtacgcagcaggatcatcagtttctgcttgtcagattcgttctccagcgttgccggattcagtttctggttgagcaacacgccgccgagaatcgctgccgtaggcagtttacccactgagccaatgaccgcagtagggccaagatggtcagtaccggaggccgggcttgcgccttctgccagcggggtgtgggctttacgcccgtccggtgttgccatagtctgcgcgccaaacggtacgttagcggagattgatgacgtacccgcgtaatagttgccgccaaccggaccacgaccgtagcgcggattatggtactgtttcagttcgtcgatataggtctgataagcgcgagccagcagcgtatcgacagtatcatcgtcgttgccgtacttcggcgcaccgttaatcagccgctgacgcagctgctcgtgagtcaggccgtcgaagtcatctgccagtgcggcagcaagctgttgctgaccaatcgcaccttgttcaaacaccagtttcttcactgccgccaggctgttgccgaggttggcaatgccgacctgcaggccagaaacccagtcatatttcgcgccgccttgcttgatacttttcgctcgctcaatacagtcatccaccagcgccgagcagagaatatcgtgcacgttctcttccagcatggtgtcgacgacatattcgatttcgattgatttgcgggtgtagtaacggatttgcgtatcccacgcgtccatcacttcatcgaagttgttgaagttacctgccgacaacgctttttcttgtggcaggaacactttgccgctggtggcatcatgcccgccttccagcgccgccagcatcacgcgggcgaagttgataaagctcatgccggtacagcgatagccccatttgccaccgacggcggtttctatacaaccaatcgctgcgtagtcataagcgtcctgcggttcaataccgagtttaataaattccgggatcacgatttcgtcgttgttgaacgccggcatcccgaagccgcaacggatcacctgtacgcaggcgtcgaggaaatcgttgctcattcctgcatggtaacgcacgctgaggttaggctgagtggaacgcaggcgaccgcaggattcgaggatcgcgtaagagagtggattcaccgcgtccattggttgaccatcaaccagattttgcccgccaatagtgacgttctgatacagcggacttcccgcagaggcttttgagtgtgagccggagcggatcttgttcacttccagcagtttcagccagcagctatgcagcatctcgatggcgtgttcgcgatccagcgtctggttgagttcaacgtcgcggcgatagtacgggtagagatactggtccatacgaccaaacgatactgagtgaccgttagattcgatctgcaaaatcaactggatgaagtaacacagttgcagcgcctgccagaaagtctgcggcggctggtgggcgataagatcgcagttttctgccatcgccagcagttcatcgcgacggctttcgcgggtttcggtcgcggccatttcacgcgccagggcagcgaaacgttcaatgtgttcactgactgccaccagcacgatatcaatcgctttcaggaattgctcaccgtgtaaatcttccagcaccgtcaggttgatgcgcgagcgacgttccgctactttctcgcgcagaccatcaagccctttttccagcagcagcgggaaattcaccgccaggtgcgcatcgccggaggtcatattgccttccgctttaatgattccggtcgccagcagacctttttgctcatcggtaaacatgccgtagcagcgatcctgtacggtctgaccgcgccaccacgggcacacttcatgcagaacgcgtttgttctcttcgctcaccgcaaagccagcaccgggacgatctgccagatcatcaatctctttttcgatccacgagacagtatattccgggaagatcggcgcggcgcgaacttcgcttgcctggttgccaatgatcaactcatcgtgtttgatccagatggtgcgattcgccaggtgatgcgccagtgccagcgcgcgacgtaccgggatcggcttatcgagatgttgttgatacatctcggtatagtgctgcgcgcgctcggtacagactggcggtttcacaatatgcaccagcgcatttttgtgcgctttaatgcggtcgctgagcgtgtccagtttcagtgtggtcatggttgttatcctcgtaaggtcgcggttaaccctttctggcaggcatactgctgggcaaagtcgagcagttctggcgcatcaagcggtttttccggggcgtcatagggcagattaagtaagtgatatttgttgatgcccagcgtgtggtagggcagaaaatgaatttcgccaacgtgcagctcgtcggcggcaaaatcggtaatggcttttacagaggtttcgtcggcattaaagccctgaatcagcggcacgcggataatgatttttttgcccgctgcggcgagttttttcaggttatccagcactctggcggcgttaccgtcggtccactgtttaaacggcgcgtcggcaacgtgttttaaatcggcaagaaacagatcgatatagggcagagaaggggcgatatatttccacggcacatgcagacaggtttctaccgcagtatgaatgcctgcctcgtggctggcttgcagtagcgccatcgccatttccggctgcataaagggctcaccacccgaaagcgttaaaccgccgccgctgcgatcgtaaaacggtttatcgcgcagaacggtcgtcatgatctcctcaacgcttttcacttcaccacacacggttaatgcctgtgtcggacagcagtcggttaacgccgtcagatgctccggggttaacttttcccgatgaataagcaaaccattcagcgcgcgctcaatcacttccggcgcggccttagcgcacagctcgcagccttccagacacagtcgtgcgtcatacagcagatcctgcgtgcgggcgcggctttccgggttctgacaccagcggcagcccagcgaacagcctttaagaaatacgaccgtgcggataccggggccatcatgggtcgagtagcgctgaatattgaaaatcatagttgcctctctatttcgttcaagcattaaaatactttcgaatgaaagttagattgatgtgcgtcaactgttcagagagttttcccgtgatagtctacattcagacaaaaagtacattttgaggatggttatggaactgtatctggatacttcagacgttgttgcggtgaaggcgctgtcacgtatttttccgctggcgggtgtgaccactaacccaagcattatcgccgcgggtaaaaaaccgctggatgttgtgcttccgcaacttcatgaagcgatgggcggtcaggggcgtctgtttgcccaggtaatggctaccactgccgaagggatggttaatgacgcgcttaagctgcgttctattattgcggatatcgtggtgaaagttccggtgaccgccgaggggctggcagctattaagatgttaaaagcggaagggattccgacgctgggaaccgcggtatatggcgcagcacaagggctgctgtcggcgctggcaggtgcggaatatgttgcgccttacgttaatcgtattgatgctcagggcggtagcggcattcagactgtgaccgacttacaccagttattgaaaatgcatgcgccgcaggcgaaagtgctggcagcgagtttcaaaaccccgcgtcaggcgctggactgcttactggcaggatgtgaatcaattactctgccactggatgtggcacaacagatgattagctatccggcggttgatgccgctgtggcgaagtttgagcaggactggcagggagcgtttggcagaacgtcgatttaaccggacgttctgcatcctcataaattgctgatgacgtggcggagtgccgcgtcttatcaggcctggaggtggcaattactgcccacacacctcacaccccggattacgcatcagtttcatttcgcgaaactgacaggtcatcgcatcgtacatgacgattttcccgctggccggtttgccataacctgccagcattttgatcgcttccattgcctgcaacgaaccaattacgccgatcaacggtgccattacgcctgcttccacgcaggttaatgcattttcaccaaacaaacggctaaggcagcgatagcacggttcaccgtcctgataagtaaagacggtgatttgaccttccatacgaattgccgcgccggaaaccagcggtaccttcgcggcaaaacagcctgcgttcagttgattacgtaccgcaacgttatccgtacagtcgagcaccagatcgtgttcagcaatcaatgctgcaagttctgcgtcatccagcagtgcattgactggcgtaatcgcgatatgtgggttgatccgcgtcagggcgtcacgggcggattccaccttcggttgcccgaccgtggcatcactgtgcagtgtctggcgttgcagattcgagagcgaaaccgtgtcgaagtcgagcagcgtcaggttaccgacaccggcgcttgccagatactgcgaggctgcacagccgaggccgcccaggcccactatcagcacgcgagaatctttcagcgcctcctggccgtcaaaatcaaagccgcgcagaatgatttgccggttgtagcgcagcatctcctgatcgctgagttccgccattacaggcctccgaacaacgcgttaaacggttctacttccacccattcgcccacttccacattgccgcgatcgcgttccagcacgataaagcagttgccgaggctaaaggagctaaatatatgtgaaccctgatgtccggtggtcgtcacttccagttcgccatcggcgttgcgttgcagcacgccgcgctggaaatcaagacgtcctggcgtttttttcaggcgggacgctgtgcgtacgcgctggcgcgcgggcaggccgctggcggtgttaccgcttagttttgccagcaaaggctgtaccagttgatagaaggtcagcgtcgctgaaaccgggttgcccggcaggccgcagaaccagctattgctgagtttaccgaacgcgaacggtttacctggtttaatcgccagcttccagaaggcgatctcccccagctcttcaagaatcgttttggtgtaatccgcctcacccactgaaacaccgccggaactgatcaccacatccgcctggctgtcggcttcaataaatgcggcgcgcagggcatggggatcgtcgcggataatccctaagttaattacctcgcatcccaactgttctaacatcaggtgtacggcgagacggttggtatcgtagatttggccgtcgcccagcggctgaccgggcaactggagttcatcaccggtagaaaaaagcgctacacgcactttacgaatcaccggaacttcggcaatccccagtgaagcaattactggcagctctgcggtagtcaggcgagttcccgccgggaaaacaaccgcacctgcagagatatcttcaccgcgacggcgaatattttgcccgctacgcacttcagcagtaaaacgcacgccattgtccatttgttcagtctgctcctgcatcaccaccgcttcgcagccttccggcaccggcgcaccggtcataatacgaatgcaggtacccgcaggccattcaccatggtatggctgaccggcaaaggatttaccggcaacgggcagcggttgcccggaggcaatatcggctaaacgcaccgcgtagccgtccattgcggagttatcaaaccccggaacatcaagcggcgaaacgacatcgctcgccagaatacgaccaaaacactgtaccagtggcagcgtttcctgggcggtcagtggggtgacgcgagaaagcatctcattaagcgcggtgtcgagcgacatcaatccggtggtaaattccatgaaaacactcctgcggaggcaaaatcgaatttgcctattatgtcagaaaaacgccacagactgtatgccacctcgggcgtagcgctgggtcctgcctttacatgccatatccatctttctatattcaaaaattgaatgagtaattcataaaaattctgatatttatagcaaaagtggcgaaccacccttaatggacgaatactatgggcaaagcagtcattgcaattcatggtggcgcaggtgcaattagccgcgcgcagatgagtctgcaacaggaattacgctacatcgaggcgttgtctgccattgttgaaaccgggcagaaaatgctggaagcgggcgaaagtgcgctggatgtggtgacggaagcggtgcgtctgctggaagagtgtccactgtttaacgccggaattggcgctgtctttacgcgtgatgaaacccatgaactggacgcctgtgtgatggatggtaacaccctgaaagccggtgcggtggcgggcgttagtcatctgcgtaatccggttcttgccgcccggctggtgatggagcaaagcccgcatgtgatgatgattggcgaaggggcagaaaattttgcgtttgctcgtggcatggagcgcgtctcgccggagattttctccacgcctttgcgttatgaacaactactggcagcgcgcaaggaaggggcaaccgtcctcgaccatagcggtgcgccactggatgaaaaacagaaaatgggcaccgtgggggccgtggcgttggatttagacggcaatttggcggcagccacgtccacaggcggaatgaccaataaattacccggacgagttggcgatagtcccttagtgggtgccggatgctacgccaataacgccagtgtggcggtttcttgtaccggcacgggcgaagtcttcatccgcgcgctggcggcatatgacatcgccgcgttaatggattacggcggattaagtctcgcggaagcctgcgagcgggtagtaatggaaaaactccctgcgcttggcggtagcggtggcttaatcgctatcgaccatgaagggaatgtcgcgctaccgtttaacaccgaaggaatgtatcgcgcctggggctacgcaggcgatacgccaaccaccggtatctaccgtgaaaaaggggacaccgttgccacacagtgatgaacttgatgccggtaatgtgctggcggttgaaaatctgaatattgcctttatgcaggaccagcagaaaatagctgcggtccgcaatctctcttttagtctgcaacgcggtgagacgctggcaattgttggcgaatccggctccggtaagtcagtgactgcgttggcattgatgcgcctgttggaacaggcgggcggtttagtacagtgcgataaaatgctgttgcagcggcgcagtcgcgaagtgattgaacttagcgagcagaacgctgcacaaatgcgccatgttcgcggtgcggatatggcgatgatatttcaggagccgatgacatcgctgaacccggtatttactgtgggtgaacagattgccgaatcaattcgtctgcatcagaacgccagtcgtgaagaagcgatggtcgaggcgaagcggatgctggatcaggtacgcattcctgaggcacaaaccattctttcacgttatccgcatcaactctctggcgggatgcgccagcgagtgatgattgcgatggcgctgtcatgccgcccggcggtgctgattgccgatgagccaaccaccgcgctggatgtcactattcaggcgcagatcctgcaattaatcaaagtattgcaaaaagagatgtcgatgggcgttatctttatcactcacgatatgggcgtggtggcagagattgccgatcgggtactggtgatgtatcagggcgaggcggtggaaacgggtaccgtcgaacagatttttcatgcaccgcaacatccttacacccgtgcgctgttagctgctgttccgcaacttggtgcgatgaaagggttagattatccccgacgtttcccgttgatatcgcttgaacatccagcgaaacaggccccccccatcgagcagaaaacggtggtggatggcgaacctgttttacgagtgcgtaatcttgtcacccgtttccctttgcgcagcggtttgttgaatcgcgtaacgcgggaagtgcatgccgttgagaaagtcagttttgatctctggcctggcgaaacgctatcgctggtgggcgagtctggcagcggtaaatccactaccgggcgggcgttgctgcgcctggtcgaatcgcagggcggcgaaattatctttaacggtcagcgaatcgataccttgtcacccggcaaacttcaggcattacgccgggatattcagtttatttttcaggacccttacgcttcgctggacccacgtcagaccatcggtgattcgattatcgaaccgctgcgtgtacacggtttattgccaggtaaagacgcggctgcacgcgttgcgtggttgctggagcgcgtgggcctgttacctgaacatgcctggcgttacccgcatgagttttccggcggtcagcgccagcgcatctgcattgctcgcgcgttggcattgaatccaaaagtgatcattgccgacgaagccgtttcggcgctggatgtttctattcgcgggcagattatcaacttgttgctcgatctccagcgtgatttcggcattgcgtatctgtttatctcccacgatatggcggtggtagagcggattagtcatcgtgtggcggtgatgtatctcgggcaaattgttgaaattggtccacggcgcgcggtcttcgaaaacccgcagcatccttatacgcgtaaattactggcggcagttccggtcgctgaaccgtcccgacaacgaccgcagcgtgtactgctgtcggacgatcttcccagcaatattcatctgcgtggcgaagaggtggcagccgtctcgttgcaatgcgtcgggccggggcattacgtcgcacaaccacaatcagaatacgcattcatgcgtagataacattcaggcggagaataaaatggcaagagctgtacaccgtagtgggttagtggcgctgggcattgcgacagcgttgatggcatcttgtgcattcgctgccaaagatgtggtggtggcggtaggatcgaatttcaccacgctcgatccgtatgacgcaaatgacacgttatctcaggccgtagcgaaatcgttttaccaggggctgttcggtctggataaagagatgaaactgaaaaacgtgctggcggagagttataccgtttccgatgacggcattacttacaccgtgaaattgcgggaaggcattaaattccaggatggcaccgatttcaacgccgcggcggtgaaagcgaatctggaccgggccagcgatccggcgaatcatcttaaacgctataacctgtataagaatattgctaaaacggaagcgatcgatccgacaacggtaaagattaccctcaaacagccgttctcagcgtttattaatattcttgcccatccggcgaccgcgatgatttcaccggcagcgctggaaaaatatggcaaggagattggtttttatccggtgggaaccggaccgtatgaactggatacctggaatcagaccgattttgtgaaggtgaaaaaattcgcgggttactggcagccaggattgcccaaactggacagcataacctggcgtccggtggcggataacaacacccgcgcggcaatgctgcaaaccggtgaagcgcagtttgctttccccattccttacgagcaggccacactgctggagaaaaacaaaaatatcgagttgatggccagtccgtcaattatgcagcgttatatcagtatgaacgtgacgcaaaagccgttcgataacccgaaggtccgtgaggcgctgaattacgccattaaccgtccggcgctggtgaaagttgcctttgcgggctatgcaacgccagctactggtgtggtaccgccaagtatcgcctacgcgcaaagttataaaccgtggccttacgatccagtgaaagcgcgcgaattactgaaagaggcgggatatcccaacggtttcagtaccacgctgtggtcgtcacataaccacagcaccgcgcagaaagtgctgcaatttacccagcagcagttagcgcaggtcgggattaaagcccaggtgactgcgatggatgccggacagcgggcggcagaagttgaaggtaaagggcaaaaagagagcggcgtgcggatgttctacactggctggtcggcttcaaccggcgaagcggactgggcactatcgccgctgtttgcctcgcagaactggccaccgacgctgtttaataccgcgttttacagcaataaacaggtggatgacttcctggctcaggcactgaaaactaatgatccggcggaaaagacccgcttatataaggcggcgcaggatatcatctggcaagaatcgccgtggatcccgctggtggtagaaaaactggtgtcggcacacagtaaaaacctgaccggtttttggatcatgccagacaccggcttcagctttgaagacgcggatttgcaataagcaacgcagggagtggaatgcttaattacgttatcaaacgcttactggggttgattccgacgctgtttatcgtctcggtgctggtgtttttatttgtccatatgctgcccggcgatccggcgcgattgattgccgggcccgaagctgatgcgcaggttatagaactggtgcgtcagcagctggggttggatcagccgctgtatcaccagttctggcactatatcagcaatgctgtgcagggggattttggcctgtcgatggtgtcgcgtcgtccggttgccgatgagattgccagccgctttatgccaacgctgtggctgaccataaccagtatggtctgggcggttatatttggtatggcggcgggaattatcgccgccgtctggcgtaaccgttggccggatcgattgagtatgaccattgcggtgtcggggatctcgtttccggcatttgctctggggatgcttttaattcaggtattctccgttgaactgggctggctgcctaccgtgggagcagacagttggcagcactacattttaccctccctgacgctcggcgcggcagtggccgccgtgatggcgcgctttacccgcgcgtcgtttgtcgatgttttaagcgaagattatatgcgtaccgcgagggcgaaaggggtgagcgaaacctgggttgtcctcaaacacgggctacgtaacgcgatgatcccggtagtgaccatgatgggcttacagtttggctttttgctcggtggttccatcgttgtggagaaagttttcaactggccgggacttggacgcttactcgttgactccgtagaaatgcgtgattacccggtgattcaggcggaaattctgcttttctcgctggaatttattcttatcaacttagtggtggatgtgctttacgccgccattaacccggctatcaggtacaagtaaggatgcgactatttaactggcgacgtcaggcggtgttaaacgccatgccactggtcaaacctgaccaggtacgtacaccgtggcatgaattctggcgacgatttcgccgtcagcatatggcgatgaccgccgcattattcgttattttattgattgtggtggccatttttgcacgctggatcgctccctatgacgccgaaaattattttgattatgacaatctgaataacggaccttctttgcagcactggtttggcgtcgattcactggggcgtgacattttcagccgtgtcctggttggtgcgcaaatctcgctggcggcgggcgtgtttgccgtgtttatcggtgcggcgatcgggacgttgctgggcttgctcgctggatattatgaaggctggtgggatcggctgatcatgcgcatttgcgatgtgctgtttgccttcccgggtattttactggcgatcgctgttgttgcggtgttgggaagcggcattgctaacgtgattattgcagtcgccattttttccatccccgcgtttgcccgcctggtgcgcggcaacacgctggtgttgaaacagcaaacctttattgagtcagcacgcagtattggtgccagcgatatgaccgttttgttgcgtcatatcctgcctgggaccgtctcttctatcgtggtgtttttcaccatgcgcattggtacctcgattatctctgccgccagcctctcatttctcggcctcggtgcgcagccgccgacaccagagtggggagcaatgctcaatgaggctcgagcggatatggttatcgcgccgcatgtcgctgtttttccggccctggctatttttctgaccgtactggcgttcaatttgttgggcgatggtttacgcgatgcgctggatccgaaaattaaaggatagttacgtttgaatattgcttgaaagggtaatcacctcacaggaaattattgccctaagcaagtgttgtaactttctgctgattttgtagaatcgggtaatttggttaaaaagccgcagcaagggacaatttttgcagcggcacagcgttcagatagttattttgttaaatgtattaacatgctgagtttatacgaaaagataaagataaggctgataattttatttttattggcagcactgtcatttattggtctttttttcatcattaactatcaactggtatcggagcgcgcggtaaaacgtgccgatagccgctttgaacttattcagaaaaacgttggctatttctttaaagatattgaacgttcggccctgacattaaaggactcactgtatttattaaaaaatacagaggagattcaacgcgccgtgattcttaaaatggaaatgatgccatttttagactcggtgggactggtacttgatgataataaatattatcttttttcgcggagggcgaatgataaaatcgttgtttatcatcaggaacaagtaaatggaccgcttgtcgacgagtcagggcgggttatttttgccgattttaacccatcgaaacgaccgtggtcggtggcttcagatgactctaacaacagctggaatccggcatacaattgctttgatcgtccgggtaaaaaatgtatctcttttacgctacacatcaacggcaaagatcacgatttgttagcggtggataaaattcatgtcgatttaaactggcgatatctgaacgagtatcttgatcaaatcagcgctaatgatgaagttctatttttgaaacaaggccatgagatcattgccaagaatcaactcgctcgtgaaaaactgattatttataatagcgaaggtaattataatattattgattctgtcgatactgaatatatcgaaaaaacatcagcggtgccaaacaacgcattattcgaaatctatttttattatcctggcggtaatttattgaacgcatcagataaacttttttatctgccgtttgcgttcattattatcgtattgctggtggtttatttaatgaccactcgtgtgttccgtcggcaattttctgaaatgacagagctggttaatacgctggcgtttttgcctgactcaacggatcaaatcgaggctctgaaaattcgtgaaggcgatgcgaaagagattatcagcatcaaaaattcgatcgcggaaatgaaagatgccgaaattgaacggtcaaataaattgctctcactgatctcttacgatcaggaaagtggttttattaaaaatatggcgattattgagtctaacaataatcagtatctggctgtggggatcatcaaactgtgtggtctggaagccgtggaagcggtgtttggtgttgatgagcgcaataaaatcgtcaggaaattgtgtcagcgaattgccgagaaatatgcgcaatgctgcgatatcgtgacattcaatgccgatctctatttacttctgtgtcgggaaaatgtacagacatttacccgtaaaatagcgatggtaaacgattttgacagcagctttggctaccgcaatctgcgcatccataagtctgccatttgtgaacctttgcagggggaaaacgcctggagttacgcagaaaaactgaaactggcgatttccagtatccgtgaccatatgttctcagagtttattttctgtgatgacgcgaaactcaacgaaatagaagagaatatctggattgcgcgtaatattcgccatgcaatggaaattggcgaactattcctcgtctatcaaccgatcgttgatattaacacccgcgccattctgggcgcggtggcgttgtgccgttgggtgtctgcggagcgggggatcatttcaccgctgaagttcattaccattgctgaagatatcgggtttatcaatgagctgggttatcagattattaaaacggcaatgggtgaattcagacattttagtcagcgtgcgtcgctgaaggatgatttcttactgcatattaatgtttcgccctggcagttaaacgaaccacactttcatgagcgttttaccaccatcatgaaagaaaatggcctgaaggcgaacagcctctgtgttgagatcactgaaaccgtgatcgagcgaattaatgaacatttttatctcaatattgaacaactgcgtaaacaaggggtacggatatcgattgatgactttggcaccggtttgtcaaacctgaaacgtttttatgaaattaatccagacagcataaaggtggactcgcaattcaccggcgatattttcggtactgcgggaaaaattgtgcgcattattttcgacctggcacgctataaccggatcccggtgattgcggaaggcgtagagagcgaagacgttgcgcgcgaattaatcaaattaggatgtgttcaggctcaggggtatctgtaccagaaacccatgccattctccgcctgggataaaagtggaaaattagtaaaagagtagtttacgtatgtccagaatcaataagttcgtacttacagtcagtctgctgatttttatcatgatttcagcagttgcctgcgggatctacactcaaatggtaaaggaacgggtgtatagcctgaaacagtccgttattgatactgcttttgcggtggcaaatattgctgaatatcggcgtagcgtggcaattgatcttatcaacacgctaaatcccacggaggaacagctgttggttggtttgcgcacagcttacgccgactcggtttccccctcttatttgtacgatgtcggtccttatctgatttccagtgacgaatgtattcaggtaaaggagttcgagaaaaattattgtgcagatattatgcaggttgtgaagtatcgacatgtcaaaaatacagggtttatctcttttgacggtaaaaccttcgtctattacctctatccggtaactcacaatcgtagtctgatatttttgcttggtctggagcgtttttctttactgtcaaaatcgctggcgatggacagcgagaacctgatgttctctctatttaagaacggtaaaccggtgaccggtgatgaatataatgctaaaaacgccatcttcaccgtttcggaagcgatggagcacttcgcctatttgccgaccggattgtatgtatttgcgtataaaaaagatgtttatttgcgggtttgtacattgattattttctttgccgcattggtggcagtgatatcgggtgccagttgcctctatctggtacgcagagtgattaatcgtggtattgtggagaaagaagccatcattaataaccattttgaacgcgtactggatggcgggcttttcttttcggctgccgatgtcaaaaaactctacagtatgtataactcggcgttcctggacgacctgaccaaagcaatgggcagaaaatcctttgacgaagatttaaaagcgctgccggaaaaaggcggttatttgtgcctgtttgacgtcgataaattcaaaaacattaacgacaccttcggtcatttgctgggcgatgaagtgttgatgaaagtggtgaaaatccttaaatcacagatcccggtagataaaggtaaagtctaccgcttcggcggtgacgaatttgcggtgatttatacgggtggaacgctggaagagttgctatcgattctaaaagaaatcgttcatttccaggtgggaagcattaatttaagtaccagtatcggtgtagcacattcaaatgaatgtcctaccgtcgaacgcttgaaaatgctggcggatgagcggctgtataagagtaagaaaaacggcagggcacagattagctggcagtaatcattattcgcaggccggacaaatgattttgcccggcctgaattaattaaacccggctaccccacaaatcgtactcatcggcgtgctcgactttcacacgcaggatatcacccggcttaacgttggtttcaccattgagataaaccgcgccgtcgatttccggtgcatctgccatgctgcgaccaatcgcgccttcttcgtccacttcgtcgataatcaccagaatttcacggcccactttctcttgcaggcgctcggcggaaatctgctgctgcagctgcatgaaacggttccagcgttcttctttaacttcttccggaacctggtcaggcagggcattggcgtctgcaccttcaaccgggctgtatttaaagcagccaacgcgatccagacgcgcttctttcaggaagtcgagtagcatctggaaatcttcttctgtctcgccagggaagccgacaataaaggttgagcgtagggtcagttccgggcagatttcgcgccactgtttgatgcgcgccagttggcgatctacagaacccggacgcttcatcagtttgagaatgcgcgggctggcgtgctgcaacggaatgtccagatacggcaggattttgccttctgccatcagtgggatgacgtcgtccacatgcggataagggtaaacgtagtgcagacgtgtccagatccccagtttcgataactgttcgcacaggctgaccatgctggtttttaccggctcgccgttgtggaagccagtacgatgtttaacatcaacgccataggcggaagtatcctgcgagatcaccagaatctctttaacgcccgcatctaccagacgtttcgcttcacttaacacttcgccaatcggacggctcaccaggtcgccgcgcatagacggaataatgcagaaggtgcagcggtgattacagccttcagaaattttcagataggcataatgacgcggcgtcagtttcacaccttgttctggcaccaggctcaggaatgggttgtgtttcggttttggcacgtagtgatgaacgtgctccagaacctgctcatagctatgaggcccggtgatttccagcactttcgggtggacttcgcggatctgatcttcttttgcccccagacaaccggtcacaataaccttgccgttttcattcaacgcttcaccaatggcttccagtgattcttgtaccgcgctgtcaataaagccgcaggtgttgacgatcaccatgtccgcatcgtcatagctcggtaccacgtcataaccttcagtgcggagttcggtgagaatacgctctgaatcaacaaggtttttcggacagccaagggaaacaaagccgattttcggctggggagttactttgctcatagcttaaaaaatattcagttacaggaaaggtcagggcagggattctacagagttctggataaaatttgtatcgcaatctcattcgctggcggaggcgaaggaaatgtaaattttgttaattcggcgtgaagaattgatcctggacagcattttgctcaaaaaatagccatactatttaattgcaacaaggctgggaagaggaggatcgaagtatgttcgttgacagacagcgaatcgatctgctgaaccggttgatcgacgcacgcgttgacctcgccgcatacgtgcaactgaggaaggcaaaaggatacatgtccgtcagcgaaagcaatcatctacgagataacttttttaaactgaatcgcgaactgcacgataaatcgctgcggttgaatcttcatctggatcaggaagagtggagtgctcttcatcatgctgaagaagcattagcgacagccgcagtatgtttgatgagtgggcaccatgattgcccgactgttattaccgtcaacgccgataagcttgaaaattgtctgatgagcttaacgctgagtatccagagcctgcagaagcacgccatgcttgagaaggcctgaaaactaagggggagaaagcgtctcccccttcatgtttaagtttttgtaaaaatgaatttgttatctcctccactgactacgctttaagccagagtcaatccggaggcgttatgcatcgacaatcctttttccttgtgccccttatttgtctttcttccgctctctgggcggctcctgcaacggtaaatgtcgaagtactgcaagacaaactcgaccatccctgggcactggcctttttacccgataatcacggtatgttaatcactctgcgcggcggcgagttgcgtcactggcaagcaggaaaaggattatctgcgccgctttccggagttccggacgtttgggcgcacgggcagggcggcctgctggacgtggttttagcgcctgattttgctcagtctcgccgcatctggttaagttattccgaagttggcgatgatggcaaagccggaactgctgtgggttatggccgcttaagtgatgatctctcaaaagtgaccgacttccgcaccgtctttcgccagatgccaaaactgtctaccggcaaccattttggcgggcggctggtattcgacggtaaaggttatctttttattgctctgggcgaaaacaatcagcgcccgacggcgcaggatctggataaattacagggcaaactggtgcgtctgaccgaccagggcgaaatcccggatgataatccttttataaaggaatccggtgcgcgcgccgagatctggtcttatggcattcgtaatccgcaaggaatggcgatgaatccgtggagtaatgcactgtggctgaatgaacatggcccgcgcggtggtgatgaaattaatatcccgcaaaaaggcaaaaactacggctggccgctggcaacctggggaatcaactattcaggctttaagataccggaagcgaaaggggagatcgtcgccgggaccgagcaacctgttttttactggaaagattcgcccgctgtgagcggcatggccttctataacagcgataaattcccccagtggcagcaaaaattatttattggcgcgctgaaagataaagatgtcattgtgatgagcgtcaacggcgacaaagtgacagaagatggccgtattttaacggacagagggcagcgaattcgtgatgttcgcactggacccgacggttatttatacgttctcaccgacgagtccagtggggaattacttaaagttagcccacgcaattagctaacgggaatcatcaccactttgcgcactgcggggcgttcagtgagttgctgataccagcgttgcagatttggacgcggtgtccaggtcaggccaacgttaaacaaattgtagatgaacggtgcgatagcgatatcgcccacaccaaactcgtcgccagagaaccattttacttttgccagttccgcatcgagcagggcaaacagggcgtcgcactctttgcaactggcatcaatggcggcctgatcgcgctcttccggtggtgttctgactaatcccatcaggatcccgcgatgagcattactgagcgtctggtttgcccagtccatccatttttccgcttccgcacgacgtgccggtgagtcgatccacaggcgtttttgcccgtactgtgccgccagatagcggacaatggcgtttgattcccaaagaatgagatcactttcgtcgtcacgcaacaacggcaccagcccgttagggttcatcgccagaaaatcagcatcgtgatttatcccaaactcacggcccgcgagaatttgctcataaggtagttccagttcttcgagcgtcagcaatactttttttacgttagttgaattattccgaccccacagcgtaatcatactcaccccttttccgacaggcagccacaggctgaacaggactccgatggtgaagtaaagttaacttttaagcaacagctggcaaaaaaatgacaccagaagcagcgaagcggcaggatattgcataaactttaaaaactttaccaacttacggtttctttaagtttgtgtgtgcgttattaatcaccaaacttatcatacggcgatataacgtattttttttgaatggatactcgggtggcatttatgacgcaatactcctctctccttcgtggtcttgcagcgggttctgcatttttattcctttttgccccaacggcattcgcggcggaacaaaccgttgaagcgccgagcgtggatgcgcgtgcatggattttaatggattacgccagcggtaaagtgctggcagaaggcaatgcggatgagaaactggatcccgcgagcctgactaaaatcatgaccagctatgtggttgggcaggcgcttaaggccgataagattaaactcaccgatatggtgacggtcggtaaagatgcctgggcgacgggaaatccggcactgcgtggttcatcggtaatgttcctcaaaccgggcgatcaggtttcggtggcagacttgaacaaaggtgtgattatccagtccggtaatgacgcctgtattgcgctggctgattacgttgccgggagccaggagtcatttattggtctgatgaatggttatgccaaaaaactgggtctgaccaacactaccttccagacggtgcacggcctggatgcgccggggcagttcagcaccgcgcgcgatatggcattgctgggtaaagcattgatcctcgatgtgccggaagagtacgccattcataaagagaaagagttcaccttcaacaaaattcgtcagcctaaccgtaaccgtctgctgtggagcagcaatctgaatgttgatggcatgaagacaggaaccacggcaggcgcgggatataatctggttgcttcggctacccagggcgatatgcgtttaatctccgtagtgttgggggcgaaaaccgaccgtatccgttttaatgagtctgagaaattattgacctggggtttccgcttctttgaaaccgtgacgccaattaaacctgatgccacctttgtgactcagcgcgtctggtttggtgataagagcgaagtgaatctcggggcaggtgaagcgggctcagtgaccataccgcgtgggcagctgaaaaacctgaaagcgagttatacgttaacggaaccgcagcttaccgcaccgctgaaaaaaggtcaggttgtcgggaccattgatttccagcttaacggtaaatccattgagcagcgtccgctgatcgtgatggaaaatgtggaagagggcggattctttggtcgggtgtgggatttcgtgatgatgaaattccatcagtggttcggcagctggttctcttaatcttctgataaccggatggcgcgaaacgtcatccggttatacgtcattaatacatcaacttaatgcgctgcgtctgcgcgtacttcacatactcatcttccgggcaacaatcgctcaccacaatatcaaagcgtttcaggtcacccatgcgcgccggacgcaccttgccaaatttactgtggtcgacaaccagcacatgcttttgcgccatcgacatggcccagtgttttaccggcaactcttcaagattaaaacaggtagcgcctttactgacatgcacgcccgccgcagaataaaaagcgatatccgggcaaaaattattcagcgtttgctgaaaatcgatgggtttgaaaatggcgttgctggcgtgaaattcaccaccgcaaagaaacgcgcggcaatggggtttctctttcagcgccagaaaggtatttagcgaataacaaacggcggtaaaagggatttcattatcaatcgcttcaataatccacggcgtggtggtgccacagtcaaaaaagagggtctgatcgggttctaccagcgtcgcagccagttttgccgcccggcgtttttcttccaccaggcgggatttttgatcgcttaacaggtaatggctggcactgcgcggttccagaacaatatagccgccgagcaaaacgacgggcgcactgtggttgttcagatcgcgacgaatcgtcatctccgaaaccccaagcagggcggcggcgtctttaagatgtaacttatcgctgcgttttaattcttgcagcagctgcccgatacgctcttcgcgacgtgtttccataatccctctgaatagttattgaagcgagccgctcaatactacactttttagcagagatcagtcacgcacccagcctttgcggatcggtaatgcaaaacagacgcgataccacgattgcagacgttgatagagtttatgccccatcgcttgccagataatctgggcactaaggcagccaatcatacctgccagcaatccaccgagcatatccagcggccagtggacgccaagataaacgcgcgaccaggcaatgacgacggccagcaccattaaaagtgagccggaccacaggcgatgccagcataaaaatgccagtgcaaaggtgaaaatcaccgtaccgtgatcgcttgggaatgagtcatccgccgcatgatgcaggaagttatagccgatattttcgacaaagggtcggtcgtgcggaaaaagatgtcccatcgtccaggacacaaacaggctgaccgccagcgcgatagcgatttttatcaccagttgccgttgtgctgtaagcccccacaaccaaagtaccacggccagcaacggcaccacggtaatcaaatctttagcaataaaaatcgccaacgagatcatccacggagccgagtctggcgtcgcgttaataagagagaatagagagagattcaaattttccagcataacttcccgacgcaaagtgattaaaagggagccaatacaggcaagtcgttgagaataaagtgcaggttaaactgggtaaagcggcatcgtcttatttccctcaagcggcctgtttacggtgggtgattgtaacgggcataggttaaataaaacttaaagaaagcgtagctatactcgtaataatgtaagaatgtgcttaaccgtggtttcagctacaaaattcgctttctcgttagctgcgcttttattaaactctgcgcgattattattggcgaagaaattgcatgcaaaataaattagcttccggtgccaggcttggacgtcaggcgttacttttccctctctgtctggtgctttacgaattttcaacctatatcggcaacgatatgattcaacccggtatgttggccgtggtggaacaatatcaggcgggcattgattgggttcctacttcgatgaccgcgtatctggcgggcgggatgtttttacaatggctgctggggccgctgtcggatcgtattggtcgccgtccggtgatgctggcgggagtggtgtggtttatcgtcacctgtttggcaatattgctggcgcaaaacattgaacaattcaccctgttgcgcttcttgcagggcataagcctctgtttcattggcgctgtgggatacgccgcaattcaggaatccttcgaagaggcggtttgtatcaagatcaccgcgctgatggcgaacgtggcgctgattgctccgctacttggtccgctggtgggcgcggcgtggatccatgtgctgccctgggaggggatgtttgttttgtttgccgcattggcagcgatctcctttttcggtctgcaacgagccatgcctgaaaccgccacgcgtataggcgagaaactgtcactgaaagaactcggtcgtgactataagctggtgctgaagaacggccgctttgtggcgggggcgctggcgctgggattcgttagtctgccgttgctggcgtggatcgcccagtcgccgattatcatcattaccggcgagcagttgagcagctatgaatatggcttgctgcaagtgcctattttcggggcgttaattgcgggtaacttgctgttagcgcgtctgacctcgcgccgcaccgtacgttcgctgattattatgggcggctggccgattatgattggtctattggtcgctgctgcggcaacggttatctcatcgcacgcgtatttatggatgactgccgggttaagtatttatgctttcggtattggtctggcgaatgcgggactggtgcgattaaccctgtttgccagcgatatgagtaaaggtacggtttctgccgcgatgggaatgctgcaaatgctgatctttaccgttggtattgaaatcagcaaacatgcctggctgaacgggggcaacggactgtttaatctcttcaaccttgtcaacggaattttgtggctgtcgctgatggttatctttttaaaagataaacagatgggaaattctcacgaagggtaaaaaaatgcctgactgctttgtgcgatcaggcattctcgaattaatggtgatggtcgtcaatctggtgttcgataaccatcccttcacctacgctggcaagatggcgaacataaggatgcgggcggtaagccggagctggcgcaggagccacatagacggtttgcggcacagtcgcgacgctgaccgcttgtggaacgctgactgaatcaggaaccacaaccactttgtatccactcggcacatcgacggtgacactttgcgccatcgccacaccagtaaagcccattaaaagcgcgcccaacagtagacaatttttcataatcatttcgcctgaaataatgcagcgggttaatttccgcgaattatgcagccttcattcaggcattgtgttgccgggcgtgctgccggttttattggtcaaatggcgcttcgtgtttaagaactttatcgatcacatccagtacgccttcacggttattggagcctgcgcggtattttgccgctgcgacgaccgcgctaccggcattttccattgcaaaactaaagcctgcctgacgcagcatctcaatatcgttaccgccatcgccaaagaccaccacttcgctgtcgtctattccccataatttctgcagttggcgaaggccattggctttatgtacgccggggataatcagatcgatgctgccgttgccggtgtggaccgacaccataatatcgccgatggcctcatgtaatgctttttgtacttgtggaatcagttcatcggaaagattcaggccaaacttaaagaagatatcctctaagttgtcaaagttatcgacgtattccagacggtgataatacatttccgccaccgttttcatggcatcgtcatattttttgagtgtataggcactattttttccgcaggcaataatttccacttccgggcgcgtcagcaaatgttccacgacagtagcaaacgcatccttcgatagctcgccattaaaaacatctttgccttcgctcactacccagccgccgttttcagccacaaaggcaatttcattagcaatttcagggaagaaagagatcaactgataatattgattcccgctggcgactacaaagcgaattccttgtgctttcatttgctgatactgagccataaaccgctcacggttataggttttttgatcgcttaagaaagtaccatccatgtctaccgcaattaatttaatgctcatcaactattctccatcgccgtctgcgttttggtatcgggtttggcgacggctttcgcgacaatagccgcgagaataaccagcgccagtacaaccagcattgcactacgtaatccataatgttcgccgagatagcccagcagcggcggcccgacgaggaaagccagataaccggtcgttgctaccacactgacgcgggttggtgcatcggggccggtatcgctggcggcagaaatggtcagcgggaagcccagcgaggcacccagtccccagagtacaacagacaccccagcgacccaggcgctatcgacaaaaataatcagcccaatacccaacgcccccattagtgcactggcccgaaccacggcaacgcgactgtaacggtcgatgaaccaaccgccggtgaagcgtccaacggtcatccccagggtaaaaccggcataaatcagcgagccggaagtagggctaaaaccgtgaccgtcaaccattaataagggtaaccagtcgttggcagaaccttcggcaaaggccatcgccagcaccacaacacctatcagcagcaactggatatcgcgataaaaaggtacgcctttttcgccatgctgggtgccatcggcagcatttttgcccgtaccgtcagggattgcctgaatggcgatataaataggtgcgatacctaccagcgccgccaataaaatgtgcaccgttgccggaacgccaaaggccgtcagtgccatcccgacacctgcgcctgccagcgtgcccaggctataaaaaccgtgcatcatcggcaaaaccgtcttattcatttctcgctcaacggcagcaccttcaacgtttatcgccacttccgcagaaccaaaacttgccccaaagacgccgagaccaacggcaaagagcaggggcgatgtcagccagagtgccagacttaatatcatcatcccgatcaatgcgcaggacatcgtgaccaggatgacattacgtgtcccaaagcgtttcactaaccacgccgagcagagaataccgctcatcgaaccgatcgacagaccaaagagaacaccgcccatttcagcgatcgagacagagagaatatcgcggatagcaggcgtacgggttgcccaggacgccattaacaggcctggcaaaaagaagaacataaacagcgcccaggttcggcgtttcaatgcattacgtgaagaatttacggtcatagatcacgtcaaaataagaagagggaagacaacattagcaaggttgtgtacatttgtacacaattgcagagagaggaaatgacatgcgtcgcgctaacgatccgcaacggcgagaaaaaattatccaggccacgctggaggcggtgaaactttacggaatacatgctgttacgcaccgcaaaattgctacccttgccggggtaccgttgggatcgatgacctactatttttcaggaattgatgagttgttactggaggcgttcagcagttttactgagatcatgtcccggcaatatcaggcattttttagcgatgttagtgatgctccgggcgcatgccaggctatcaccgatatgatctacagctcacaggttgcaacgccggataacatggagctgatgtaccagctctacgcgctggctagccgaaaaccgctattaaaaacggtaatgcaaaactggatgcagcgcagtcagcaaacgctcgaacaatggtttgaacccggaaccgcccgcgcgcttgatgcgtttattgaggggatgacgctgcattttgtcaccgaccgtaagccgctatcgcgcgaggagattttgaggatggttgagagggttgcagggtagtagataagttttagataacaaaaaacccatttatgtaaacgggttaatgaaaacaataagttagagtaaaaacaataagttgggttggtggtcagtggtggttattacggggtaatgccaaccgctgccgccactttgtcgccacttggcagcgttgccagaggattgaaacggagcgccgtttccagatgatccggtgccagatgtgcgtaacgcatagtcatttttatatcgtggtgtccgagaattttttgtaaggccagaatgtttccacccgacatcatgaagtgcgccgcaaacgtatggcgcagaacgtgtgtgagttgaccgcgagggagcacgatagacgttttttccatcacggataaaaattgaaaatagcagtctgtgaagaaattgaacccatcaagcgccatgatctcttcgtaaagctctttactgatagggatgcttctatttttcttccccttcgttcttacaaaggtaattcggtatttggtcacctgtgaacgagtaagatttatggcttctcgccagcgtgcgcctgtgcttaagcatatcttaactaccagtgccagaattgggtcctgacgtttgcaatcagccagtaattcaacaatctgctcatgggtaagccatgccatctctttttctgcgatggtgaattttcgcatgttctccagtgggttcggatacgaccattcgcccaggcgggatagttcgctaaaaacactacttagatagctttgctccaggttaatggtgaccgggcttgctcctttcttccatttctcgctgaagtagatctcacctgtcaggcgtttatctcgatagtgggcaaacattttagaggttagatcagttgcaaggggattgcccagagcgtcaaccatcagcagcaatttgtcatagacatgctgcccagctgtcagtgatttaccatgtagtttgaaccatagctcaaccacgtctttcagtgttcgacgatccactgattcacctagccagggctttgcttcggtttcttccatcgtgtgacgctcaaaagccagtgcttcgcctttggtggcgaattgtttacgcacacgacgtccactacgtccggcggggtaacattcgcaaagccattttcctgtggtgagttttcgtactgccataaaaaagccctcatatcagagggctaaatttaactgtatatacaaccagtaatcaatgtgtgattgctatgaaacatacattgctaagcaacatgtagttcatcgttggcggaagtggctgctttgcgttcctgctcaatagctagtgactctctatattctttcgcctctgcaaacattgtccagtgggcattgatgttcatatcttcaataaccgatttaatttctttaatatttacgttaaaaaactcttttcgtgagttaattttattgacctgcttttcgttgaagactttatgcagatgattttctaatgacggtgcatcatcactataaatcatcgcatgaacatcgaacgaaaaaggaacactagcatccccaagttcacgaacacgatcaagtggttcaaggcggcgtgtcattccaattttatatacatcttcgccaaatgagccaatattgctaattatataaacatggcctgatctagtttgttgagccatagaaatagctcgttggtttttagcttcagcttcttcatattttaactgtagttcagctattttttgctctaaagctaagcgttgttcttcatttgcaagcataagctctttcgttgctttatttatagcttgctgaatagctttttcttctttttcggcttcttttatcgctttttcatactctctacgagctctttcctcttcacgaagctgttctttaatccttctttgctcctctttttcttcgagcataatttcattaactgcaactccccattttagctcgttgagtcgtgcctgaagatagatgtcacttatttttgcggatctaaaagcagagccattataatttacaagttgaaatgcatcttttatttcttgggaaagttttccaaaattgttgtgtttgacttttgataaaatactgtcaactcttccattgaaggcatccaaaacaaagttgatagcagtattacgcctgttttgctcaacataatcacacgaagctgctttattagtttttattaatgattttgttaactccctggctttttgtaattccttgcctgcatctgtaaactcataattttctgccaattcatcaagtacactacggttagggatgatccattcatcgccataaccttcaattttatttttcattgatttggcaactgcttcatatttttctgcaaactctttagcttcatatgctgaaccagcaatctcttttgctctttcttctgcatcggtaataatttttactgcgttgtcattagcatttgagatcagctcatttgctttactgttggcattatcaagacgttctttggctttcaggcgtgcatcgcgagcgtctttggtgattgctatagcttcgctattagcgttgcttattgttatctgagcttgataacttgcttcgtttactgtcttagctgcctttatttgggcttcttctattttttgcctagctattgagtctgcattttttatcttattctctgcctccatcactgcgctgtgcaattcttcgtattgccataatggtgctgctcgcccttcaagctctgatagatctcgtgcagtctgtgctaacttttcttgattttcactcagttggctggaaagggctatgttgttagccgtcaggttatctatggcggctttgtgttctttactttgcttaaataatattatagctagaacaggggcgagaaatgctaataataatataacgatggaaaatgaattcatttttaaatccttttactatatcaatttgaaactattgtacttcttatacaagcaaccacttcaatatcagaaaatgcacattcaaagctattctctgtagttgtaattttaatcataccttttggaagctttgtgatttttcgaatggaataggttccgtcgatgttgattaaccagtgtccatcaagtacttcagaaaatttttgatcacaaatgtatgtgacaagcccatcctgaataacaattggtgatgaaagatttgcaggaagaaatgatgaatcgaatacatatgaaccatcttcaatcattttgcctgcggtaaggcgaaacttgggaagctcttctgtggctactgtcagcgagctttgcttaagtccttgcccggtggttaaccatttcagtgaggttcctgtttcaagagcacattggattatccagtctgcaggaaacgtatcccgcaaatacctgttcgccagagtgctttttgatacttccaagtgatcagctaaagcctgtcgtgtcgtaaagccataagcttcgactaatcgctcaatcgcagccttaccacctttattgggatttattttgatctcacttgggtactttgatgttgacatatctcttttgcgatcctagtatcagttttgtccccatttgggtacttgtcacgattactacaggctcaccacaagccaataggagatgttgcatcatgacccctaacatttcaataactctgaatacgccacatgtcacaattgagcgttatagcgaacttactggtctttcaatcgacacaattaacgatatgctggctgacggtcgcatccctcggcatcgccttcggaaagacaagaaaagagaaaaggtgatgatcaaccttgctgctcttaccgttgatgcacttactgattgcaatgttgtattcaactagttccattttgggatacatcaggggtgtcgaccatgtttgattaccaagtttccaaacatccacattttgatgaagcctgtcgtgcattcgcattgcgccacaacctggtgcaactggcagaacgtgctggcatgaatgtgcagattctgcggaacaagctgaacccatctcaacctcatttattaaccgcaccagaaatctggctgcttaccgatctgactgaagattcaacgctggtagatggttttctggcacagattcactgcctgccatgtgtaccgattaatgaggttgcaaaagagaaactgccgcattacgtcatgagcgcaactgcagagatcggacgtgttgcagcaggtgcggtatctggtgatgtaaaaactagtgccggtcgtcgtgatgctatcagcagcattaactctgtaacacgactgatggcgctggctgctgtttcattgcaggcccgtttacaggctaatcctgcgatggcgagtgcagttgataccgtgactggcctcggtgcttcattcggtttgctgtgaggtgcttatgctgacgaaagaaccatcatttgcatcgctgctggtaaaacaaagcccggcaatgcactacggtcacggctggatcatgggtgaggatggtaaacgctggcatccgtgccgttcacaagatgaattgctggcagaactatctacgaaaaaacgggggaacaaatggctattgaaggcgctgcggcgactgttccattaagccccggtgaacgcctgaatggacttaatcacatagcggaattaagggcgaaagtttttggtttgaatattgagtcagagcttgagcggtttattaaagatatgcgtgatccacgggatatcaataatgaacaaaataaacgggcactggctgccatattctttatggcaaaaattccagctgaacgtcatagcatcagcattaatgagctgaccactgacgaaaagcgggagttgattaaagcaatgaatcattttcgtgcagtggtgagcttatttcccagacggctaaccatgccgaattaaccaactaatgaaattaatggcgtaaacccgccgggcatccctttatctaaattcaggagcattgcttatgcgtaatattgaaaccctcacgaccaaaaccggaccggatgatgcaggtcttaatcttttactgacagaggctcgtctggaagaacgccgggcaagggctgaagcaatggctgctcgcctcgatagcctggcgtgtcatatcacctcccgccagctaaaccacgtcgaagcggcagaactgctgcgtgtgactgctgaagcaatccagaacgaagcgcaggagatccactgatggctgatgcaatggatctcgtacagcagcgcgttgaagaagaacgccaacgccatatccgtgctgcccgtgccaaaacgccgggcgtgtcccgcgtgctttgcgttgagtgtgaagcgccaattccgccagcacgccgccgtgccattcctggagtgcagctttgcattacctgccaggaaatcgcagagctgaaaggcaaacattacaacggaggtgctgtatgagcaccatcctgaaatgggcgggtaataaaaccgccattatgtccgaactgaaaaaataccttcctgctggcccgcgactggttgaacctttcgcgggttcttgtgctgtgatgatggcgacggattaccccagctatctggttgcggatattaatcctgatttaatcaacctctataaaaagattgccgctgattgcgaagcgtttatatctcgtgccaaagttttatttgaggaagcaaacagtgagctggcttattacaacataagacaggagtttaattactcaactgaaattactgatttcatgaaggcgatatatttcctgtatctcaatcgtcacggttaccgtggtttatgtcgctataacaagagcgggtatttcaacattccctacggtaattataaaaatccgtatttccctgaaaaagaaattcgcgcatttgcagagaaagcccagcgggcaacgtttatctgcgcgagctttgatgaaacgctggcgatgctgcaggtgggggatgtggtgtattgcgatccgccgtatgacggtacgttttccggctatcacactgatggtttcactgaagatgaccagtatcacctggcatccattcttgaacatcggtcatcagaaggacatccggtcattgtttctaacaatgacacatccctgattcgttcgctgtatcgcaattttactcaccactatatcaaggcaaaacgcagcatcggcgtgtcagctggcgagggtaaatctgcaacagaaatcattgctgtttccgggccgagctgctggttgggatttgatccttcgcgtggcgtggatagttctgccgtgtacggagtgtgtgtatgagtcatgacgatatgaacaattgcagcggctttaacgaggccgccgcagcattttcatggaacggctcgaaaaaggccattaacccttatctggacccggcggaagttgcgccggagtctgcactttcaaacctgatcactctgtacgctgccgataacgagcaggaacaactgcgccgcgaggcactgagtgagcaggtctgggagcgttatttctttaatgaatcccgtgatcctgtccagcgcgaaatggagcaggataagctcattagccgggcaaagctggcgcatgagcagcagcgttttaatccggacatggtcattctggcggacgtaaacgcccagccttcccatatcagcaagccgctgatgcaacgtattgaatacttcagcagcctgggcaggccaaaggcttattcccgctatttgcgtgagacgattaagccatgtctggagcgactggattgtgtacgtgacagtcagctatctgtttctttccgttttatggcaagccatcaagggctggagggtctgctgatcctgcctgaaatgagccaggatcaggtgaaacgcctgtccaccctggtagcagcgcatatgagcatgtgtcttgaggacgcttgtggtgatttgtatgccaccgatgacgttaagccagaagaaatccgcaagacatgggaaaaggtggcagcggaaaccctgcgtctggatgttatcccgcctgcatttgagaaacttcgtcggaaaagaaaccgccgcaaaccagtgccctatgaactcatcccgggttcgctggcgcgtatgttgtgtgccgactggtggtatcggaaattatggaagatgcgttgcgaatggcgggaagagcagttgcgtgctgtctgcctggtcagcaaaaaagcatccccctatgtcagctatgaagccgtgatgcataaacgtgagcagcgccgtaagtcgctggagttttttcgttctcatgaactggtgaacgaagacggcgacacgctggatatggaagatgtggtaaacgccagcagcagcaacccggcgcatcgccgcaatgagatgatggcctgtgttaaaggtctggagcttatcgcggaaatgcgcagtgactgtgccgttttctacactatcacctgtccgtcgcgtttccattccacgctcaataacggcagaccaaacccgacctggacaaacgcgacggtaagacaaagtagcgattatctggtcggcatgtttgctgcatttcgtaaggctatgcataaagccgagttgcgctggtatggcgtgcgggtagctgagccgcatcatgacggtactgtgcactggcatctcatgtgtttcatgcgtaaaaaagaccgccgcgccatcactgcattactgcgtaagtttgccatccgtgaagaccgcgaggagctgggcaataacacgggaccacgctttaagtctgagctgataaacccgcgcaaaggtacgccaacaagctatatcgcgaaatacatcagtaagaacattgacgggcgtggtctggctggggagatcagcaaggaaacgggtaaatccctgcgtgataacgctgaatacgttaatgcctgggcgtctctgcatcgtgttcagcaattccgcttctttggcattccggggcgtcaggcttaccgtgaactgcgattgctggctggtcaggcggcaaggcaacagggtgacaaaaaagcaggtgcgccggtactggataacccgcgccttgatgccattctggctgctgctgatgctggttgttttgccacctatatcatgaagcagggcggcgtactggttccccgtaaatatcacctcatcagaaccgcttatgaaatcaacgaagagccaaccgcctatggcgatcacggtattcgtatttatggcatctggtcacccattgcagagggcaagatctgcactcatgcggtgaagtggaaaatggttcgtaaggccgttgacgttcaggaggcggcagccgaccagggcgcttgcgccccttggactcgtggcaataactgtccccttgctgaaaatttgaaccaacaagggaaagacaaatcagctgatggggataccagaacggacattacccacatggatgacaaggagttgcacgattacctgcacagtatgaacaaaaaagagcgccgggaactggctgcaaggttacgcctggtgaaaccgaaacggcgtagagactacaaacagcgaattacagaccatcaacgacagcagctcgtctatgaactgaagtccagaggatttgatggcagcgagaaagaggtcgatttactccttcgcggcggcagtattccgtcaggagcaggcctgcgtgtcttctatcggaaccagcgtttgcaggaagatgataagtggcggaacctgtattaattacgcgggttaacaattcgtgctcttaataataccaggcatatcaggctgatgaacgtaaaaaaacgttttacatcagtaagattattatatactgtaaatataaatagtggttatctatacagtattgtttgcggtgtcataggaggaaagatgcaggactattttttggagtctttgaagctccagcgcattgatttttttcttaagcttgtagcggctagtgagtgtagtgatgaagagaaggggctggccctgcagtgggtttctgaattgactgatgaactcatggcaaaaatcagaagccacgaatacaaccgctcaatggatgtcatcagctgaggtgacttttatgcgcattgaaataatgatcgataaagagcagaagattagccagtctaccctggacgctctggagtccgagctttaccgcaacctgcaacccatctatcccaagaccgctatccgcatccgtaaagggtcggcaaacggcgttgagctgagtggcttaaagcttgatgaagacaaaaagcgggtgatggaaattatgcaacaggtttgggaagacgacagctggctgcactaaggaacgttcctgatgtaagaacttgaatctgacgtcagcaaggttgaacaacgagagtagcgaggcgttagccatgggtaaaaaagacagtaatcaccagattatttatcggggctaggtgctggaacgtttaacccttggcgactgggtcttctttcaacgcccaaaggagtgtggcggaggtttttggttgggccgcatctatgaagactgcttctggcttgagctggaattccccgtttcgctatatgacggcctggggtttttgatggaagtcaccaggggagagcagagaagtgatgaggttgacgcgaattatcccctgtttgattaaaaatgtattagcttataatggaatactatttttgcaggtgggggcgcaatggatttagtctttaaagttctggcttcgttgggtggggtgtcttttgttgcatctggcatatttgtttggatcgggaaagtttatttagaaagatataagtcgcggctaaacaaagatattgctgaatttcaatcacaactgagtgcaactaatgaaagaataaaggctaagttagacaattctgtttatgtaacgaaagcgtattttgataaggagttatcagcatatagtctcatttggaattcgatgtttgaaaccagagaaagcgtgcttaagctgaggcctgcgctggatcatgttgaccccaacgaaccatttgaagagagaaaatttagaaggttgaaagttttttttgatgcatttaacacttttgttacaagtgttgaatctaacaaaccgttcatctcaccagaggtttatataatcttggaccgtttccggaaggaatgccttacagagtcaatatcgtttaagcatagcgatccagaatttgacgggcaaaattattggaaagaggcggagttgaaccatacaaccatcaccaagctttttgatgagacgtgtgatgcaattcgagacaggatgcacacattaactgtggttacgtaggtttccaaaaagtctcgatgcccgctttggagattgtgcatgtctatgccgcatgaatccgcatgatcgtttgaggatcgttttagctgaggcccgccaggagtggcgggattttgcttatgtcatgcaggcgcatgaaaaccgctacataaagcgggcaggcgtggcggggatacgagcgcgcgcttgtggctttgaatactcaaatcatgtaatgttaattgtccaagctcagatgttattttagaatcgtagttcactagagctgtgttaattgggaagtattcatggataaacaacgtgcttcacaagtttttgtgcctggcggtatgccgaaattgacttatgttgagcgctctgaaggagaggttcatggaaaactggagagtgctaaagataatttatgtaagttagtgactttaactgggcaaacaaagtctggtaagactgtaattacaagaatggtattcccagtcatggacgatgatgttgtatggattgacggtgggagtattacaactgaagatgatatttgggagcaggtattagaaaaactaaatggctaccatagtattgaagttaattctggagaaaatagtgctattgcagttagtggtaaggtatcggggaccgcaagtgcattcgttgttaaaggtacaggtgaggctggtttagttcagacggatggaaagtcaaatggtaataaaaaatcgcgaacgatatccgcaaaaagttctgcactaaaagttctctctcaaaccaagtctagtcttataattgatgactttcattaccttgatcgtgacctacaaggtaactttattagagcgataaaaccattagtttttgatggagtaccagttgtactgatagccattccacatcgaagatatgatgctgtaaaagttgaaaaagaaattaccggacggctagaaaatatttccatgccttcgtgggaaatggatgaactaaaacaaatagcaaaagtgggatttcctctgttaaacatggaagttagtgattcagtaattgataaaattgccaatgaatcattgggaagccctcatttaatgcaagagttttgcaaggctatatgcttagcaaataatgttaaagaaactttgccgagtaagttagttattaattctttagatgatgatatttttagaaaggttgcagaatccactgggaaaatagtatttgataagttagctagtggccctaatcagcgaactgacagaattcctagaaaactgaaaagtggtgaggaagtagatatatataaagttgtattatatgcattgtcacatatgaaaccaggaatgcaaagtattcagtatgaggagttaagatcagccatacgcgaactggtgcaagatgctcctccacaagctcatgaggttactcgtgttatagaaaaaatggctaaaatagctgctacggaagaagcttcaactcctgtaatagattgggataaggaggaccgaaagttgcatattactgatccattttttgctttttatctaaaatggcgataaaggttctggctgccaaactggcagccttaaagctaatttgaatgaagtttatattcttcgaactgtatcactttttcttttaaccaaacatttaactcttcaaatcttttttgcaatggtattagttcattgcgtacaaatacattacttgccttctccacatccccaaaccccccaacattatttggcattatccccatcatctgtggcggcacgcggtgtgccgccatcatgtcatcgcgactaacatttttgatattcagaaattcatccttcgctgcgacttctgacaacgggataatctgaagtccgtcttttttaccattaggcgagtacataaacagattgcggaagttacccggacctttggcgcttttcattgcgttgcggaggttgttcacatcctcctggttctgcgcggcatcggtcatgtacatgatgaagccggcatgactgccgttaatgtaatacttgcggcggaacagcgtggcggactcgttgagcaaagcggatgggatggcagaaagatagccgggcaggccgtagatctcctggttgatgtccggttccatcagctgaaaaatgctgcctttcgtgaactgatacggctgggttgtcataccgtattgcacaaaccagtaggtatccaggtctaacccgcgtcgggtgtattttgccagcgcaggctcaagggcgataacttcaccgaatcggttcgtgcgtttctccaggtaggcgttaccaaataccagatagtcctgtacaaaacgcgaaaaagcctgttggctgagcagcggatgagggatataggtactggtcagaatgttgcactttactgcaatcggggaactgtgatgcacggcagcccggaaggtgcgcgccagtccgtcaaaacttacgggtggctcgtaccaacactccatctgtacgcattccacatagtccagcagttcgcggcggtccagaacaggaacgggatcaccgaagctgaatgcttcggctgaagtctggcttttatgctggatctgtttcgtcgacgcagcgcggttcttcttactctttcccatcaaaaaatctccacaatattgctggtattggcggactcgccctgcagcggttcgttaaacagtgcgtgcattgttgcccaggccagatcggcatggctggcttcttcgctgcggctggcttcataggtcgggcggttgccactggcagtggtagcgcgacggattgccataaatgactgcgcaatgtcggtgtgcccggcgtcaaactccagacggcggtggctgataatgtcgtaggccttgagtaccagggcgtttttaacattggggttgtagacaaactcccggacggcaggaaagaacgctttcacgttctcataaaccccgtgaccaacgccggttgagtcgataccgatataggtcacgttgtactgttcggtcagttttttgatggcgtcagcctgggcgcggaagtccatcccgcgccactggtgacgctcaagaatgcggaacttaccaccaggcacggctggcggtgccaccaccacgcatccggcgctgtcgccgttttgcgtaccttttgccgggtcataaccgatccacacttcgcgccagccaaacgggcgcagagccagtgcatgaaagtcggtccagacttcccagctgtccaccatgcacgcctgcagctcgctgagcggaaatacggacgcgagatcgtccacaaactcgcacatcagcaggttctggtattcgtccgggctgtactccatgcgcaactggtcaaggtcgaacaggttacagccgccgcgcaccgcatcttccacggtgactatctggcggtattgcccgtctgcgcacagcaggccgggggccagattgctgtgggacaggtcgatgtccaccttgtcggccttgttgcgcccacggttgaacagcgcaccggaccagaacggataagcactgtgtgtcaggctggatggcgtggaaaaataggtttgtcgccattttttgtgaatagccataccggaagccactttgcgcagctcctggaatttcggtatccagaaatattcatccagatacaggttgccgtgataactctgggccgtgcgggcattggtgccgaggaagtaaagcgtggccccgttaggaagcaccatcggatcgcctttcaactccacccccacttctttggcgaagtcgatgatgtactgcttaaagacgtgggcctgtgccttgctggcggaaaggaaaatctggttacgtccggtaagcagggcgtcaatcagggcttcacgggcaaagtaaaaggtcgcgccgatctggcgtgacttcagcaggttgcggatgcggttggtttttccggcttcccaccagtggcgctggtagttgaacatggaggaatggaagatttcttccagcttctcaatctgctcatcggtgaaaacattcttttccggctgacggcgtgggcctttattgcggttggcgacgttagggtttaagtcggcttcgttgccgccattgttaaacttgccgatccgcgcgtggcgctccgactggcgcgccagcaggtcaatctctttgaaatctttcccttctttgtgctccttcatgatgagctggcagtagcgtgcggcggtggtgagctgcatctgatccagcggcccatagtcaccccacttgtcgcgttttttccagctgtgaacggttgcaactttctcgcccagcatttcagcaatgcgggctacgcggtatccctgaaagtacagcagcatggcctgccgacggggatcgagatctgcgggtgtcagtgtggtgttcatggcacaaacctacaaccttgaatgaaggctttccccgcctgcggtttgtgtggttgtcggtacaaataccgcgcattgtttcactgcccccatcaccgcaaccataaggctccagtaagttttttctaacggagcacggctcatgacagtgaaagcaaagcgttttcgcatcggggtggaaggtgccaccaccgacggacgcgaaatccagcgtgaatggctggaacagatggcagccagctacaacccggcggtgtataccgcgctgattaaccttgagcacatcaagtcttatctgccggacagcacctttaaccgctacggcaaggtgacggcgctgtttgctgaagaaatcaaggaaggtccgctggcaggcaagatggcgctgtatgccgacgttgagccaacggagtccctggtggaactggtgaaaaaaggccagaaattattcacatctatggaagttagcccgaagttcgctgatacgggcaaagcctacctggtcggcctggctgccactgatgaccctgccagtctgggcactgaaatgctgacattcagcgccagtgcagcccataacccgctggcaaaccgcaagcagaatcccgccaatctttttaccgctgcagaggaaacggtgatcgaactggaagaaatccaggatgacaaaccgtccctgtttgcccgtgtcacggcgctgttcaccaaaaaagagcagtccgatgacgcccggttctctgatgtgcataaggccgtggaactggtcgccactgagcagcagaacctgagtgcgcgcaccgaaaaatccctgtctgagcaggaagaacgcctgtctgagctggagactgccctgcaggcacagcagaccgcctttaacgaactggtggacaagctgagccatgaagacagccgccaggactaccgccagcgtgcaacaggcggtaacgcccccgctgacactctgaccaattgctgatggagcacaaaacctgatgaagaagaatacccgctttgcttttaacgcttatctgcagcaactggcgcgtctgaacggtgtggcagttgaagaactgtccagcaagttcaccgtagaccggaggtgcgttaaaccgacgtccgtccacgcagtttctgggaccggaaaacgacatgctgacgctttccggtgttcttatgccggaaataacaggcggcaggctgtcgttgctggcactggagcagatggcagaacaggggaaagcatggcccctgattgaaggcagcggcacgatttacggcatgtatgtgattgagggactgaatcagactaaaacggagtttttccgcgacggtatgccgcgccggattgagttcaccctgtcgctcaaacgagtggatgaatccctgtccgatatgttcggtgatctcagtgcgcaactgaataatctgcaggacacggcaacgtctgccttaagcgatatcagtaaaacggtgggagggctgctgtcgtgaatttcagctctgaactgcttaacaaaggcaacaaaactcccgcattcagcatcagtattgagggcagggatatcaccactgtgctggataaccgcctgatgagtttgacgctgacggataaccggggctttgaagcggaccagcttgatctggagctggatgacgctgacggaaaaatcgtgctgccgcgccgtggtgcggttattacgctggcgctgggctggaaggggcagccgcttttcccgaaaggggcattcacagtggacgagattgaacacactggcgcaccggaccgcctgactatccgggcgcgaagtgctgattttcgggaaacgctgaatacccgccgtgaaaaatcgtggcataagaccaccgtcggggaagtggtgaaggaaatagccgcgcggcacaagctgaagatggcactgggtaaagacctgtcggataagcccgtggagcatatagaccagactaatgagagtgacggcagttttctgatgcggctggcgcgacagtacggtgccatcgcgtcggtgaaaaatggcaatctgttattcatccggcaggggcagggcaaaagcgccactggtaaacctctgccagtgatcactatcacacgcaaggacggcgacagtcaccgatttaccctggcagatcgcggagcctacacgggcgtaattgccagctggttgcatacccgcgaacctgcgaagaaagaaagcaccacggtgaagcgtaagcgcagaactaagaagcagaagaaagagccagaagcgaagcagggcgattacctggtgggtacggatgaaaacgtgctggtacttaatcgcacttatgccaaccggagcaacgccgaacgagcggcgaaaatgcagtgggaacgcctgcaacgcggcgttgcgtcattttcgctacaactggcagaagggcgggcagatctctacacggaaatgcctgtgaaggtcagtggttttaaacagccgatagatgatgcggaatggaccattacgactctgacacataccgtcagcccggataacggttttacaaccagtctggagcttgaagtgaggattgatgatttcgaaatggaatgattcttcgcaatggagaacttttaagtttgcaaaatggaataatgcggtatcattattgtgaatttagcaaaaatggggagagctcgaaaaatgatgatttgcccactgtgtggaagtgccgcccatactcgcagcagttttcaggtatcttcattgaccaaagagcgttacaaccagtgccagaacattaactgcagccatacttttgttacccatgaaacttttgttcgttcgattgcaacgccaaaagagtcaaatccggttcagccgcatccaatgaaatcaggacaggtggcgctctctctttgacgctgccgccattttgtcgccatcgttaaaaaacagtgtttctaacatcatgattttaaacagcttaaatttcaggcaacaaaaaacccatcaaccttgaaccgaaatggcggggttgatgggctccacaaaatggggacatcaaagaaaagcagtggcactaattaagactgatgccctgcggaaaagttctgcggttgtgcaaaaaaatttcattttcagggcaacttcagttttatcctaatcctggccataccatgacgatgattgtccctgccagcgtcagcaggacgttggcgattgcataggtgcccgcatagcccagcgccgggatgttactgcgagctgtatcactgatgatctccattgccggcgcgcaggtacgtgcgcccatcattgcgccgaacaacagcgcgcggttcattcgcaatacataagcaccgaacaagaaacagataaccacgggcaccagactgacaatcaatccggcaatcaacatctgaccgccaatcgcgcccaggccgttattaataccgctaccggcgctcagaccaacgcctgccataaacaccatcaagccgaactctttcaccatgcttaatgcaccctgcggaatgtaaccgaaggtcgggtggttagcacgcataaagcccagcataattccggcgaataacaacccggcagcgttccccatgccgaaactgaatgtgctgaactggaaggtgatcatcccgatcatcagcccaataacaaagaaggcgcagaatgccagcaggtcagtgacctggctgtgaatcgagataaagccgatgcgatcggcgatggtttttacgcggcgggcatcgccgctgacttgtaaaacgtcacctttgttaagcacgacgttgtcatctatcggcatctcaatctggctacgaatgacgcggttaaggaagcaaccgtgatcggtcaacttcagttgtgcgagacgtttacctacagcgttatggtttttaacgaccacttcttcagtgacgatacgcatgtcgagaaggtcacgatcgaaaacttctttaccgttacggaagctgggatcgagtcgggcatgggcgtcgggatagcctaccaacgctatttcatcgcccatttgtagcacggcatcaccgtctggatttgccagaatcccgttacgtcgaatacgttcaatgtagcagccggtttgtcgataaatacccagttcacgcagatttttgccgtcggtccaggccaccagttccgggccgacgcgataggcgcggatcaccggtaaataaaccttacggttggcatcagtgtccaggccacgttcgcgggcgatttgctgggcgctggtctgtaagtcctgatgctgcaatttcggcaagtaacgcgcaccaacaatcaaactcaccagaccgattaaataggttaaggcatacccgaggctcagattatccagtgccagtgagagctgcctgctttccatgccggaatgacgcagtgtatcgccagcaccgaccagaaccggtgtcgacgtcatagagcctgctaacataccggccgtcaggccaatatcccagccaaacagcttacctaaccctaaggcgatcaccagcgcactgccaaccatcaccagtgctaacattaggtaatttttcccatcgcgaaaaaaaatggaaaaaaagttcggtccggcttcgaccccgacgcagaaaataaacagcataaagccaagattaagcgcatcggtgttaatgctgaaatgttgttggcctaataacagcgatacgactaaaacgccaatggaattacccagttggatcgaaccaagtcgtaactttccgagacatagcccaagcgcgaggaccacaaataataacagaatgtaattcccatttaacaattcggcgacgtttatattcacggaggctaacttcttgtttactagtaagctgttgaaagaaatggtaatttacgataatgttttttaccagaattcagggcgcagattcattcagcgcacctaaacgatagtaaagtaacaatatattttactagtgtaatcacattaggtatcaacggctatatgaattgcgttggcctatattagcatggaatgcgaagcggctttatcttactgaacgccacactggcgaaaaatgtgttcgatagacgcagtgtcaggaggaacgagtgaaacataaacaacgttgggcgggggcaatctgctgttttgtcctcttcattgtggtgtgcctttttctggcgacgcacatgaaaggcgcttttcgggctgccgggcatcctgaaatcggcttgctatttttcattcttcctggagcagtcgccagcttcttttcacagcgtagagaagtcctgaaacctctgtttggcgcaatgctggcggcaccctgttcgatgctcattatgcggctgtttttttcaccgacgcgctcattctggcaagagctggcatggttactaagcgcggtgttctggtgtgcgctgggggcactgtgtttcttatttatcagtagtttgtttaaaccacagcacagaaaaaatcagtaaagccctcaacgcgagggcttgtcagacgatcaggcgtccagattttctttcacccatgcagcaaaatcggtatagccgccgatatgttgctgatcgacaaaaatctgcggcacggtttctacgggtttacctgccttttgttgtagatcttctttagtgatcccttccgcacgaatatctacatactgatactgaaaatcatcgcgttcattgctcaatttctcagccagatcttttgcacgcacacagtaagggcaacccgaacgaccaaaaataacggtttgcattatttctctcctcatagatttatgcctgtaatgatcacgctaaaatgtattcgctgaaagtaggtttaacctgttgcattaattgctaaaagctataactgttaaacacaatacagtgaaaagttttagactgaaggctcactttgcagagggaagcgtatgcgcgcgatcggtaaattgcctaaaggcgtgttgatactggaatttatcggaatgatgctactggcggtggcgctgctgtcggtaagcgactccctgtcgctgcctgagccattttctcggccagaagtgcagattctgatgatttttctcggtgttttgctcatgcttcccgctgcggtggtggttattcttcaggtggcaaaacgtcttgccccacagctgatgaaccgtccaccgcaatattcacgttcagaaagagaaaaagataatgacgccaaccattgaacttatttgtggccatcgctccattcgccatttcactgatgaacccatttccgaagcgcagcgtgaggcgattattaacagcgcccgtgcgacgtccagttccagttttttgcagtgcagtagcattattcgcattaccgacaaagcgttacgtgaagaactggtgacgctgaccggcgggcaaaaacacgtagcgcaagcggcggagttctgggtgttctgtgccgactttaaccgccatttacagatctgtccggatgctcagctcggcctggcggaacaactgttgctcggtgtcgttgatacggcaatgatggcgcagaatgcattaatcgcagcggaatcgctgggattgggcggggtatatatcggcggcctgcgcaataatattgaagcggtgacgaaactgcttaaattaccgcagcatgttctgccgctgtttgggctgtgccttggctggcctgcggataatccggagcttaagccgcgtttaccggcctccattttggtgcatgaaaacagctatcaaccgctggataaaggcgcactggcgcagtatgacgagcaactggcggaatattacctcacccgtggcagcaataatcgccgggatacctggagcgatcatatccgccgaacaatcattaaagaaagccgcccatttattctggattatttgcacaaacagggttgggcgacgcgctaaaaccgccacgtcgatgtatgatacgcgggcttttgaccaggtctgacagagaggtgcagggtgaaaattgccatattgtcccgggatggaacgctctattcgtgtaagcggctgcgtgaagccgctatacagcgcggtcacctggttgaaattcttgatccgctttcttgctacatgaacataaatcctgcggcgtcttctattcactacaaaggccgcaagttaccccattttgacgcagtgatcccgcgtattggcaccgccattaccttttatgggacggcggcactgcgccagttcgagatgctggggagctatccgctcaatgagtcggtcgccattgcccgggcgcgtgacaaattgcgttccatgcaactgctggcgcgtcagggcatcgacctgcctgtcacgggcattgcgcattcgccggatgataccagcgatttaatcgacatggtcggtggtgcgccgctggtggtcaagttggttgaaggcacgcagggaattggcgtcgtgctggcggagacgcgtcaggcggcggaaagcgtgattgacgctttccgcggtctgaacgcgcatattctggtgcaggaatatatcaaagaggcgcaagggtgcgatatccgctgtctggttgttggcgatgaagtggtcgctgcgattgaacggcgggcgaaagagggcgattttcgttccaatttgcatcgtggcggcgcggcaagcgtcgccagtatcacaccacaggagcgtgaaatcgcgataaaagccgcgcgaacgatggcgctggacgttgctggtgtggatattctgcgtgctaatcgcgggccgttggtgatggaggtgaatgcgtcgccggggctggaaggaatagaaaaaaccaccggtatcgacatcgcgggtaaaatgatccgctggatcgaacgccacgctacgacagaatattgcctgaaaacgggtggttagtcgcaatcacattactgatcatggttttgcctgcgctttttgcgtaagctgtgccggtctttttatcgaaagaggttgtacaaaattatgacatcgctggtcgttcctggtctggatacgctgcgtcaatggctcgatgacctggggatgagtttttttgaatgtgataactgtcaggctctgcatctgccccatatgcagaatttcgacggtgtctttgatgccaaaatcgatctgatcgataacacgatcctgttttctgccatggcggaagtccgaccttcaggcgtattgccgctggcggcggatttatctgccatcaatgccagttcgctgaccgtgaaagcatttcttgatatgcaggatgataatctgccaaagctggtggtttgccagtctttatccgttatgcagggcgtaacctatgagcagtttgcatggttcgtgcgtcagagcgaagagcagatttcgatggtcattcttgaagctaatgcccatcaactgctgttaccgactgatgatgaagggcaaaacaacgttaccgaaaactatttcctccactgataactcctttcgagcacgcagtcgctggtgcagtggctgcgcgctgcaaaattatctgctgtttttaaccttttcttaaagattatttcacttctcttgtgtcgatttggctttatcacatagagcaaatatgcataaaaatttgttaaataccgttttttaatccgagctatagtctcaaaccctggctaaagttattcttgcgatgcttttatatagcgagcagtgctggccgggagaaagttctcttttcttacaccgcgccgataaaaaatatgcacgtttattgcatatctttcagtgtgacaacttttgttcgtttgttaacgaactttcagaaggaaagagatatgaccgccttaaataaaaaatggctatcgggtctggttgcgggtgctctgatggccgtctctgtcggcacgctcgcggctgaacaaaaaacactccacatttataactggtctgattatatcgccccggacacggtggccaattttgaaaaagaaaccggtattaaagtcgtctacgatgttttcgactctaacgaagtactggaaggcaaattaatggccgggagtaccggctttgatctggtggttccatctgccagctttctggagcgccagttgactgcgggagttttccagccgctggacaaaagcaaattgccggagtggaagaatctcgacccggaactgctgaagctggtcgccaaacacgatcccgacaataaatttgctatgccctatatgtgggcgacgaccgggattggctataacgttgataaagttaaagcggtgctgggcgaaaacgcgcccgtcgatagctgggacttgatcctcaaacctgaaaatctggaaaaactgaaaagctgcggtgtctctttcctggatgcgccagaagaagtttttgctaccgtgttgaattatctcggcaaagatcccaacagcactaaagcggatgattacaccggaccggcaacagatctgctgttaaagctgcgcccgaacattcgttatttccattcatctcaatacattaacgacctggcaaacggcgatatttgcgtcgctatcggctgggcaggtgatgtctggcaggcgtcaaaccgcgcgaaggaagcgaagaatggcgtgaatgtctcgttctcgattccaaaagaaggggcgatggcgttctttgatgtattcgccatgcctgcggatgccaaaaacaaagacgaagcctatcagttcctgaattacctgctgcgcccggatgtagtagcgcatatttccgaccatgtgttctatgccaacgccaataaagcagccacgccgctggtgagtgcggaagtccgtgagaacccaggtatttatccgcctgcggatgttcgtgcgaagctgttcactctgaaagtgcaggatccgaaaatcgaccgtgtgcgcacccgcgcgtggaccaaagtgaagagcggaaaataatccgcagtcgtagatgccggaggggcgcaccacacccgccggcaattcgcaccattatggtgcgcttgcacacattcaatgccggagagcagccgtgaatgacgctatccctcgcccgcaggcgaaaacccgtaaggcgctgacgccgctattagaaatccgcaacctgaccaaatcctacgatggtcaacatgcggtggatgatgtcagcctgaccatctacaaaggtgaaatcttcgcgctgctgggcgcatccggctgtggcaagtccacgctgctgcgtatgctggcaggtttcgaacaaccttctgccggacagataatgcttgatggcgtcgatttgtcacaggttccgccttacctgcgccccatcaatatgatgtttcagtcttacgcgctgtttccgcatatgaccgtggaacagaacatcgcttttggcctgaaacaggacaaactaccgaaagcggaaattgccagccgggtcaatgagatgctcggcctggtgcatatgcaggagttcgccaaacgcaaaccgcatcagctttccggtggtcagcgacaacgtgtggccctggcccgaagccttgcgaagcgcccgaaactattactgctcgatgagccgatgggcgcgctggataaaaagctgcgtgaccggatgcagcttgaagtggtggatattctggagcgcgtcggtgtgacttgtgtgatggtcacccacgatcaggaagaggcgatgaccatggcggggcgcatcgccattatgaatcgtgggaaatttgtccagattggcgaaccggaagagatctacgagcatccgactacccgctatagcgccgaatttattggctcggtaaacgtctttgaaggcgtactcaaagagcgtcaggaagatggcctggtgcttgattcgccggggctggtgcatccactgaaagtcgacgcggatgcctcggtggtcgataacgtgccggtacatgtggcgctgcgcccggaaaaaatcatgctttgcgaagagccgcccgccaatggttgtaacttcgcggtgggggaggtgatacacattgcctatctcggcgatctttcggtgtatcacgttcgtctgaaaagtgggcagatgattagcgcccagctacaaaacgcccatcgtcatcgtaaagggttaccgacctggggcgacgaagtgcgtttgtgctgggaagtggacagctgtgtggtgctgacggtttaaggagcaaagatgagtacacttgaacctgctgcccagtcgaaaccgccgggcggatttaagctgtggttgtcgcagctgcaaatgaagcatgggcgcaaactggtcattgcgttgccatatatctggttgatcttgctgtttctgctgccatttctgattgtctttaaaataagcctggcggagatggcgcgcgctattccaccttataccgaactgatggagtgggctgacgggcaactgtccatcactcttaatctcggtaattttctgcaactgaccgacgatccgctctatttcgatgcttatctccagtcgctacaggtggctgcgatttcgacattttgctgtttactgatcggctatccgctggcgtgggcggtggcgcacagtaagccttcgacccgtaatattttattactactggtgatcctgccgtcgtggacctcgtttctgatccgcgtttatgcctggatgggaatattaaaaaacaacggtgtgctgaataattttctgctgtggctgggggttatcgatcaaccgctgaccattctgcataccaatctggccgtttatatcggcattgtttacgcttacgtgccgtttatggtactgccgatttataccgcgttgattcgtattgattattcgctggtggaagcagcgctggatctcggtgcacgaccgctgaaaacgttctttactgtgatcgtgccgctgactaaaggtgggattattgccggatcgatgctggtgtttatcccggctgtgggcgagtttgtgatcccggaactgctcggtggcccggacagcatcatgatcgggcgcgtgctatggcaagagtttttcaataaccgcgactggccggtggcctcggcggtagcgatcatcatgttgctgctgctaattgtgccgataatgtggttccacaaacaccagcaaaaaagcgtgggagaacacggatgaataatttaccggtagttcgttcgccctggcggattgtgattttgctgctgggctttacctttctctacgcgccaatgctgatgctggttatctattcgtttaacagctcgaagctggtgacggtgtgggccggctggtcaacgcgctggtatggtgagttattgcgcgatgacgcgatgatgagtgcggttggtttaagtctgacaattgcggcctgtgcggcgacggcggcggcgatcctcggaactattgcggcggtggtgctggtgcgctttggcaggtttcgcggatcaaatggctttgcctttatgatcaccgcgccgctggtaatgccagatgtcatcacgggcttgtcgctgttgttattattcgtcgcgcttgctcatgccattggctggcctgcggaccgcggtatgctcaccatctggctggcgcatgtcactttttgtacggcttatgtggcggtcgttatttcttcaagattgcgggaactggatcgctcgatagaagaagcagcgatggatctcggtgcgacgccgctgaaagtgtttttcgtcattacgctaccgatgatcatgcccgcgatcatttctggctggttactggcttttactttgtcgcttgatgatctggtgatcgccagctttgtttccgggccgggagccaccacgttaccgatgctggtcttttccagcgtgcggatgggggtgaatccggaaatcaacgccctggcaacattgatcctcggcgcggtcggaattgtcggatttatcgcctggtatctgatggctcgcgcagaaaaacagcggatacgcgacatccagcgtgcaagacgtggctgaagacactaaaatttgccaacctggctacataatgccgcgcatgtcgcggcattgttttcatggaagacgaaacgttgggattttttaagaaaacatcttcatctcatgctcgcctgaatgtgcctgcgctggtgcaggtggcggcgctcgccattattatgatccgtggcctcgacgtgctgatgattttcaatacgctgggcgtgcgcggtattggcgagttcattcatcgcagcgtacaaacctggagtttaacgctggtctttttaagcagtctggtgctggttttcattgagatctggtgtgcgttttcactggtgaaagggcgtcgctgggcgcgctggctatatctgctgacacaaatcaccgccgcaagttacttgtgggcggcttcgctggggtacggttatccggagctgttcagcattcccggtgaatcaaaacgtgaaatcttccatagcctgatgctgcagaagctgccggatatgctcatcctgatgctgctgttcgttccctcgaccagtcggcggttcttccagttgcaataatgtgtataatcgtcgcccctgatgatgtgaaggtcaatgtatgcagtgcgcactttacgacgcgggtcgctgtcgttcctgtcagtggataatgcagccgattccagagcaactctccgctaaaaccgccgatcttaaaaatctgctcgccgactttccggttgaggaatggtgcgcgccggtgtcaggcccggaacaagggtttcgtaataaagccaaaatggtggtgagtggtagcgttgaaaaaccactgctcggtatgctgcatcgcgatggcacaccagaagacctttgtgactgcccgctttatcctgcctcatttgcgcccgtttttgcggcgctaaaaccgtttatcgcccgagcggggttaacgccctacaacgtggcgcgtaagcgtggcgaactgaaatacattctgctgactgaaagccagagtgatggaggcatgatgctgcgctttgtactgcgttctgataccaagctggcgcaactgcgtaaggcgctgccgtggttacacgaacaactaccgcagctgaaagttattaccgtcaatattcagccggtacatatggcgattatggaaggggagacggagatctacctgaccgaacaacaggcactggcggagcgttttaatgacgtaccgctgtggatccgtccgcaaagtttcttccagactaatccggcggtcgccagccagttgtacgccaccgcgcgcgactgggtacgacagctgccggttaaacatatgtgggatctgttctgcggtgtggggggctttggtttacactgcgcgacgcctgacatgcagttaaccgggatcgaaattgcatcagaggccattgcctgtgcaaagcagtcagccgctgaactgggcttaacgcgtttgcaatttcaggcgctggactccactcagtttgccaccgctcagggggatgtgccggagctggtgctggttaacccgccgcgccgcggcattggtaaaccgctgtgtgattatctctcaacgatggcaccgcgttttatcatctactccagctgtaacgcccaaactatggcgaaagatatccgcgaactgcctgggtttcgtattgaacgggtgcagcttttcgatatgttcccgcataccgcgcactatgaagtgctgacgctgctggtgaagcaataaaaaagccgcatgtgcggcttcagattgctgacaaagtgcgcgttgtttatgccggatgcggcgtaaacgccttatccggcctacaaaagcgtgcaaattcaatacattgcatgggccatgtaggcctgataagcgtagcgcatcaggcaattttacctttgtcatcagtctcaagccgcggttgcggctttctgaatcttactgtgggaaccactggtcactgattttttgataagtaccgtcagctttaattgctgccagcgcgttattcagtttttccagcagggctttgttatccggacgtacagcgatgcctaggccggtgccaaaatattgcggatcggtcactttctcagtagcaacaccaagttgtggattggttttcagccattcgtttaccaccgctgtgtcaccaaataccccatcaatacgaccatttttcagatcgataaaggcattctgataactgtcataagagacagttttcacttccgggtgctgatcctgaatatatttctggtgcgtagtaccgttttccatcccaatacgtttgcctttcagatcggcaaacgttttgtaggtatcttttttggcaatcacgacggctgagttttcatagtagggcgtggtaaacgatacctgtttgctacgctccggggtgatatccataccggagattacggcgtcatattttctgaatttcagggacgggatcaggctgtcgaacgcgtgattagtaaaagtacattctgcctgcatttgtttgcacaaggcttttgccagatcgatatcaaagccgacaatctcattattagcacctatagattcaaagggtggataggtggctgaaacgccaaaattgattttctctgcggcagaagcaccgaaagtaaaggaagcaagtaaagcggcaagaactaactttttcatgatggaactcccgtctgtcaatcttatgatttttggccgtgtctgcggcatgggataacaatgccatcaagtgaatttatatgcaataaacatgattaaataatttaaatgaaataaaaaagacggacaacttagtgggttgtccgtcttcattataagaatttatgcactatgtaggccggataaggcgtccccgccgcatccggcacaggcaccgtgctgatgtctgatgcgacgctggcgcgtcttatcagacctacaaaaccccccggcgaatgtacgcagccacattaatttcgccgttcgaatgccagcgctttgcgctcgatcagacgcatcatcagcgtcagcaggccgttaacgaccaggtaaataatccctgccgcaccgaacaccattacatcgtaggtgcgtccgtacaacaactggctgtatcccatcacttccatcagcgtaatggtgtatgccagagaggtacttttgaataccagcaccacttcgttggaataagaagagagcgagcgtttaaaggcatacggcagcaggatcgccagcgtatcttttttgctcattcccagggcgctacaggactgccactgaccttccgggatcgcacgaattgcaccgtaaaacagctgcgtggtatacgccgcactattcagcgacaacgcaatcagcgcacataaccacggttctgacaacaaatgccacagtgccggatactcctgcaaagtcggaaactggcccggcccgtaataaatcaggaagatctgcaccagcagcggcgtaccggtaaacagcgtgatataaccccgcaccagccacaccagcaccggcgttttcagcgtcaggatgatggtaaaaatcaatgccagaatcagtgccacaatcagcgaggcaacggttagcgtcaggctggtgtgtagccctttcatcagttcgggtaaatactcaaacattagctgggcctccgctcaaaacgtgtcgcgcgcaggtcaatgcgtttgagaatgtactgactgagcagggtgatcaccaggtaaatcgccgccgccacaatgtaccaggtaaatggttcctgggtacgagtagcgatgctttttgtttgcagcattaaatcattcacactaatcaaactgaccagcgcggtatctttcagcagcaccagccactggttaccgaggccaggcagcgcatgacgccacatctgcggcatcaccagacggaaaaagatagccgatttcgacagccccagcgcctgaccagactcccactgacccaccggcaccgctttcaacgcgccccgaagcgtttgcgaggcataggcggcatacagcagtgacagagcgatgacaccacaaaggaacgggctaacgtcgaagttctcaatgtccatctgcactgggatctgcacgaacccaagattgatagtgaagccatccgaaagcgtcagcagcagctgcgaggagccaaaatagataaacagcaccaccagaatttctggcaggccacgcagaatggttaccagcgctgaacctgcccacgcgacaggacgccattttgccgactcccataccgcaaagaacatcgccagcgccagcccgacaatcaatgcacaaacggcaaggccgacggtcatcccggcggcgcttgctaaaggaaaaaattcattcatcaggaattacttctggaaccatttgttgtagatggtttcgtaagtgccatctttcttcactttttccagcgcagtgttgagtttctgctgcagctcagtgttgccctgacgtaccgcgatgccgaggccagtgccgaagtaatctttatcggtcactttgtcgcccaccgccgccagtttcgggttatctttcagccactcagtgaccactgcggtgtcaccgaagacgccgtcgatacgcccgttttgcagatccagttttgcgttctggtagctgtcatacggaacggtagtgatttccgggtgcttatccataatgaatttctggtgtgtcgtcccgttctgtacgccgacttttttgcctttcagctgatcaacactggtgtatttgccttgctgacccacaaacagggcagagttgtcatagtacggggtggtaaacagcacctgcttttcacgctccggagtgatatccatgcccgccatcacggcttctacgcgacggaatttcaggcttgggatcaggctgtcaaacgcctggttagagaaagtgcaggttgcatcaatctctttacacagcgcttgtgccaggtcgacgtcaaaaccaacgatctggttgtttgcatcaatcgattcaaacggaggataggaggcttcggtagcaaaacgaatggtttcggcagctgtggcggaaagactaaaacctgcaattaacgcggcaatcagaacttttttcattgttgttatcccgaatcttagtgagagagatagtttttaaatgcttcggtttgcggctcggtaaagcagctcgcgtcgccttgttctacgatatgaccattttccatatacaccactcggctggcggttttacgcgccacttcaacttcgtgggtgacgatcacctgggtaatattcgtttctgccagctcacgaatgatgctgacgatttgtgccgtaatttccgggtccagtgcggcggtcggttcatcgaacagcagtacctgcggttccatcatcaacgcacgggcaatagcaacacgctgctgctgaccaccagaaagatgcagcgggtaacgatcgctataaggtttgagacgcagacgttccagcagtttttctgcacgggccagcgcctgatctttactcaaccccagtacacggcagggcgcttcaatcaggttttgctgcacggtcagatgcggccacaggttgtattgctgaaacaccatgccaacgttacgacgcaaatcgcgaatcgctttgtcagagggtgttttggtgaaatcgaaatggttgcctgcaatgttgagcgtaccggagcgcggcatctcaagcagattgagtacacgcagcagcgagcttttacccgcgccgctggggccaagtaacaccagcgtttcgccctgtgggcaatccagcgtgatatcgaacagcgcctgatgcgcgccgtagaagcaattaatgccgtttaattgaatactcattgacactcgtatactggcagtctgatagctattgaggtcgaagatagtacctttgacagaataattatgcaatatttctgctttaaaagttaaaagcaaagcgcattattcaataaacatagcacaaaataacgggggcggtggtcggcgagcataaatgtcggcattcctcacgaaatgccggacaatttacggggtttattggttgatcaaggcgttagcgattctcgatggactgacggagcgtacccgccgtggcatgaacgctaccgcctaagtaacgcacatcgtcgatgacccaacactggccttcctgaatcattaacacttcatcctgccaaccctggtcaccctgtttgagatccacgcgcaatggaatgttacgggcatcacgattagggatagtcgatgcactggcaacgtgggcgctatctggcaaggtggttcgactggagaatggatcgttggtcagtagttcccgatggttattatcccgggaggcatcgctaagcagtgtcgccagtttgtcgctcagataagggcgcaaggcggtgatgtcgttgctgcggtgcaaaatgcggtagtcataaaattgctgggccacgttatccgggcctccttcaacgcaaggaccactgcgtgtgccgttatctttataagctggagtgactgtggtgcaggcactgaggagcagtgcgcaggggataagcattgtcaatttgctgtagcgcataatgatttccttataagcgatcgctctgaaagcgttctacgataataatgatatcctttcaataatagcgtatcagtctgataatgcttttgagatcgaaggcttagcaaacaaggagatcgatcatgcaattttctacaaccccaactctggaaggccagaccatcgttgaatattgcggtgtggtgaccggcgaagcgattttaggtgccaatattttccgtgatttctttgccggtatccgcgatatcgttggcggacgttccggtgcgtatgaaaaagaactgcgtaaagcacgggagatcgcctttgaggaattaggctcccaggcgcgggcgctgggggccgatgccgtcgtcggtattgatatcgactacgaaacggtcgggcaaaacggcagtatgctgatggttagcgtcagcggtacggcggtgaaaacgcgtcgatgagaagattcttctggctggtcgctgccgctctgttattggcagggtgtgcaggcgaaaaaggcattgtcgagaaagagggatatcagcttgatacccgacgccaggcgcaggcggcgtatccgcgcattaaagtgctggtgatccactacaccgcagatgattttgatagctcgctggcgacactgaccgataagcaggtcagctcgcattatctggtccctgcggtaccaccgcgatacaacggtaaaccgcgcatctggcaactggtgccggaacaagaactggcctggcatgcggggattagcgcctggcgcggggcaacgcgccttaacgacacctctattggcattgagctggaaaaccgtggctggcaaaaatcggccggagtgaaatattttgccccgtttgaaccggcacagattcaggcgcttattccactggcgaaagatattattgcccgttatcacatcaagccggaaaacgtagtggcacatgcggatatcgcaccgcagcgcaaagacgatccggggccattatttccctggcagcaactggcgcagcaggggattggtgcctggccggatgcgcagcgggttaacttttaccttgccgggcgcgcgccgcacacaccggtagataccgcgtcattgctggagcttttggcgcgctacggttatgacgttaaacctgatatgacaccgcgcgagcagcggcgcgtgattatggcattccagatgcatttccgcccgacgttatataacggcgaagcggatgcagaaactcaggcgattgccgaagcattgctggagaaatacgggcaggattagcgcggcagttttccgtggtcgcgtagccaggcggcagttttctcgataccttcatccagggtgatgaccggctgataacctaactcttcctgcgcacgcgtaatatccagcgtaaagtcaaaattcaacttggagacgccgtagtgggtcagcggcggctcttttgctgacttgcggcctaaacgctccatgctgcgggcgatcatatccagcatcgggtaggggacggaacgaatacgacagtcaatattcaactcgtcgatcagcttctgcacgatgctgcgcagtgtgcgatgctcgccgttggtgatgttgtacacacgcccggaaggtagcttatcgcaggcttcctggcttgccagccacattgcgtgcacggcattttcatagtaggtcatatcgaccagcgcactgccgccatgcggtaacagaatactgccgtagtggtgcatcatatgcgccagacggggaataaagactttatcgtgcggtccgaacagactttgtgggcgcagaatagtaaagcgcgtttgtggattcgcctgcgaaagcatattgatcacttcttcgctggctgctttgctgcgggcaaactcgttggcgaagcggtgagggcgaaaatcttctttaatatcgcgatggtggtgataatcgaagtacagggagggggaagagatatgaataaagttacgcacaccccaggcgacagcccattcacccaggcggcgagtggcgcgaacgttagccagatcgaaagcctgttgtgtcccccagggtgaggtaaagctggagcagtgccacagcgtatcaatgcccgcgagcatcactttagcttgtgatgaaaccagctcggtcagatccgccggaacaaactctgcgcccattttttccagcaatttgcccattgcctcgttgcgaccggtcgctcgcacgctgatgcctttctggcataaaaactctaccgcgtttcgacctaagccgctggtggcgccggtaaccagtaccttcatatcaatccactgttgttgagaaaataacgtgcgcattcttccgtgatttcccccatgatgcaatgggaaacatgaaagaataacgcaggttttgtcgattaatctgtgctttgttctgccagtctggcgatttgttttgccattccgcgaaaaataaacagatgcgcggggatcatcaataaccagtaaaacagccccggcataccgtgcggatgccagaaagcgcggacatcgatagtacgatagtcgcctttatcttccaggctaaaacacagtcgtcccagccccggcgctttcatgccaaataacaacgtaagttgtttttccggttcaacgacaatcactttccagctatccaccgcatcgccagtctgtaaatattcgcgctccgggcggcctttcgccagcttatgaccgatcgcgcggtccatcaacgcccgtgtctgccacaaaatattgccaaagaaataacgctctttaccgccgatttggttcactacctgccataaagcagcaaggctggcggacgttttaacggtaaaccccgcctgtttggcaaaataaccgtactccggtcgccagcgggcaaaggcctgagcgtcgtagccccagtcgctggagttgaccagtttttcctcctctttcaacgtgctacgtaccgcgtcatcgaaagcgatcagccgttgtgggatgagtgcacgtagcgcggtatcatccgccagcagatcgtgtttcagcccctgaatcaacgccctggcggtggtgggcggtacggaagtaatcacattgagaaaccacaccgaaatccagcgggtggggagggggatggggatcaaccagcggcgcttaccgctcaccgccataaaatgttcaaactgttgctgataactgagcacctctggtccggcggcttcgaagatgcggtgttcgctggccggatgatctaacaacgcaaccagatagtgcagcaagttttccagcgcaatgggcgtggtgcgtgaacgaacccagcgcggaggcgttaagactggcaggttgtagaccatatcgcgcatgacttcgaacgccgcggaacctgcgccaacgataattccggcccgcagttcggtcacgggtacattcgcttcacgcagaatgtccgccgtagcctgacgagcacgcagatgatccgactgctcatgtggcggggcctgcaacgaactaagaaagattaattgcttaactggtacttcacgtagcgcatcgcggacgttgagagccacctggcgctcctgagcgataaaatcgccgccttcgcccatgctgtgcaccagaaaatagaccgtatcgatatcctgcaacagggccggtaggttatccggccagctgagatcgactttatggcaactgacgtttgccagttgcagctttgcaagcctgtcgacatgacgtgccgccgccaggatctgatgcccttgctggctgagtgtgcgcaccagatgctgaccaatgtagccactggcaccgagaactaaaatgcgttgcggcacgtctctctccttaacgcgccaggaatgcacgccagtgggcggcgacttccgccagttgttcgcgcgagacgtcaagatgcgtcaccaggcggacaatcggcgaggcgttaatcagcacgtttctcgctttcatgtattcgcctaacgcggcagcattttcttccccgacgcgaacaaacagcatattggtgtcctgacgcatcacatccgcgcctgcttcacgcagctgctccgccatccaggcagcgttgtcgtggtcttcctgcaagcgcgcaacgttatttttcagggcatatatcccggcggcagccagaatgccggactggcgcatcccgccacctgtcattttccgccagcgaatggcacgtttaatgtaatcacgattaccgacgagtaatgaaccgactggcgtcccaagacctttcgacaggcaaatggtgaacgaatcacaatattgcgtgatctctttcagttcgcagccgtaagccaccacggcattaaagatgcgcgcaccgtcaacatgcagcgccagattgcgctcgcgggtaaattcccatgcttctttcaggtattcccgcggcaacactttgccgttgtgggtgttttccagactgagtaatttggtgcgggcgaaatggatatcgtcgggtttgattttcatcgccactttatccagcggtagcgtgccgtcggcagccgcgtctatggattgcggttgaatactgcccagcaccgccgcgccaccggcttcaaacagatagttatgcgcggcctgaccgacaatatactcttcgccgcgttcgcagtgactgagcagagcgaccaggttggcctgagtgccggtaggcagaaaaatggcggcttctttaccggaaagctctgctgcgtagtcctgcagagcattaacggtagggtcgtctccgtaaacgtcgtccccaaccggggcggccatcatcgcttcgagcatggcgcggcttggtcgggtaacggtatcactgcgtaaatcaatcatggcatgtccttattatgacgggaaatgccaccctttttaccttagccagtttgttttcgccagttcgatcacttcatcaccgcgtccgctgatgattgcgcgcagcatatacaggctgaaacctttggcctgttcgagtttgatctgcggtggaatggctaactcttctttggcgaccaccacatccaccaacaccggaccgtcgatggagaaggcgcgttgcagggcttcatcaacttcagacgctttttctacacggatacccgtaatgccgcacgcttcggcaatgcgggcaaagtttgtgtcgtgtagttcggtgccgtcagtcaaatagccaccagctttcatctccatcgccacaaagcccagcacgctgttgttaaagacgacaattttcactggcagtttcatctgcactactgagaggaaatcgcccatcaacatgctaaaaccgccatcgccgcacatggcgaccacctgacgttctggctctgtcgcctgcgcacccagcgcctgcggcatggcgttagccatcgaaccgtggttaaacgaacctaacaggcgacgcttgccgttcatttttagataacgtgccgcccacaccgttggcgtaccaacgtcacaggtgaaaatagcgtcatcggcggcaaaatgactaatttgctgcgccagatattgcgggtgaatggctttctcgctcggtttagctaaatcgtccagccctttgcgggcgtcgcggtaatcttccagcgctttatccagaaacttgcgatcggctttttcttccaccaatggaagcaatgcacgcagagtcgacttgatatcgccgaccagtgccatatccaccttgctgtgagcgccgatgctggctgggttgatatcaatctgaatgattttggcatcggtcgggtagaaggcgcggtagggaaattgcgtgccgagtagcactaacgtgtcggcgttcatcatggtatggaaacctgacgagaagccgattaacccggtcattccaacatcatacggattatcgtattcgacatgttctttaccgcgcagggcatgaacaataggcgctttaattttcccggcaaactcaactaactctttatgcgcccccgcgcagccgctgccacacatcagggcgatattgctggaataacgcagcagttgcgccagtttgcgtaactcttcttcttccggcgtcacgactggttgtggcgcatgataccagtgcatggttgccccttctggcgcaggttttaacgccacgtcgcctggtaacacgacaaccgaaacgccacggttaagcaccgctttgcgcatggcaatcgccagtacttgtgggatctgctccgggctggaaaccagctcgcaatagtgactacattcgcggaatagctcttgtgggtgggtttcctggaaatagccgctgccaatttcgctggagggaatatgagcggcaatcgccagtaccggaacgtgattgcggtggcaatcgaacaggccgttgattaagtgcaggttgccggggccgcacgatccggcgcagaccgccagttctccgctaagttgtgcttcagcgccagcggcaaaggccgccacttcttcgtggcgggtggacatccactcgatggtgcccatgcgattaagactgtcactaagaccgttcagagagtcgcctgtgactccccagatgcgtttcacccctgccgattcgagtgttttggcgatataagctgcaaccgtttgtttcatggttctccatctcctgaatgtgataacggtaacaagtttagttcatctgacggagggggaagggatgggagagaaaggaggcactaacggttaaatagcccgatgaaaggaatatcatcgggcataaggcgattatgcgagaaccaaatccccctgcggatggcaggagcaggccagtacgtaaccttcagcgatttcggcgtcggtcagcgtcattgtgctgctcaccgtatattcaccggaaaccacttttgtcttacagcagccgcaaacacccgcacggcaggcagcgacaaccggaacgttattgctttccagcgcctccagtagcgtggtgccaaccggggcgtaaaattctcgtgccggttgcagtttggtgaatttcagaccgctggtcgccgcttctgctactggggtgaagaatttctctttaaagaaacgcgtcacgccgagcgctttcacttcctgctctacccaatccatatacggagccgggccgcaggtcatcacggtacgtgaagctaagtcaggtacacctgccagcagttcgcgagtgagacgaccagcgataaagccttcggtaacgttattttctgccaccagcgttaccggatagttacgccactcatcggcgaaaataacatcctgcggcgtacgcacgttgtagatcacccgcacatcggcctgtggacggttcttcgcaagccagcgacgcatcgacataatcggcgtgacgccgcagcctgccgccagcaacaggaatttatcttctgctttatcgtcgcaggtaaattcccccatcgcgtccgaaagccagagataatcaccgcgttttacatcgcgcgtcagccactgggagccgacaccgtcatcaatccgccgcacggtcagggtgatatattcactcacgcctggcgtggaggaaatggtgtaagcacgcagcgtttccgctgagtttcgcacgctgaccagtgcatattgcccggcgcgatatgggtagtaatcgtggcaaatcagggaaatcgtccacacatccggcgtttcttgcgtaatgtgatgaacctgcatccgccacgggcattgattcgttggcatcgtcatcgacaaactccttacgcgctcaacagttgcttcatgtcttcttcaacagtggtgatagaacgcaggccgaatttctcgttcagcaccgccagcaggtctggtgtcaggaaaccaggtgcagtcgggccggtgacgatatttttcacgcccagagaaagcagcgtcagcagaatgacgatcgctttctgttcaaaccaggagagcaccagcgacagcggcagatcgttgacaccgcagcccagtttctctgccagagtgacagccagaataatcgctgagtaagcatcgttacattgacctgcatctaccagacgcggcagaccttcgatatcgccaaactcaagtttgttaaagcgatatttaccacaggcgagggtcaggatcaggcagtcatccggcacgctggtggcgaaatcggtgaagtagtggcgctcgccgcgtgcgccgtcacagccaccaagcaggaagatatgacgcagtttttcacggctcaccagatcaatcagcgtatcagcagcgccaagcagcgtctggcgaccaaaacccacggtgataaggtgcggaatttcgctgtacgggaagcctgccatctgttgcgcctgggtgataaccgcagagaaatcatcaccgtccagatgacgcacgccaggccagccaacaatgctgcgggtccagatacgagcgtcataagcgcctacggttgggtcgatgatgcagttcgaggtcatcacgatggggccagggaaacgagcgaactccacttgctgattctgccagccgctgccgtagttaccgaccagatgcttgaatttacgcagctccgggtagccatgcgcaggcagcatttcgccgtgggtgtagacattaacgcccgtgccttcggtctgttccagcaggttgtagagatctttgagatcgtgaccggaaatcagaatgcatttacccgccgtcgctttgacgttgacctgggttggcgtcgggtgaccgtatttaccggtttcgcctgcatccagaatgctcatcactttgaagttcatctggccgatttccattgaacactcaagaagcgcgttcatatcggcaggccaggtccccagccacgccatgattttatggtactgggcataaatatcgttgtcgtattgaccgagaacatgcgcgtgttccatataggccgccgcacctttcaggccatacaggcacagcagacgcaggccgagaatgttttcgccaatcgccgctttatctttgttaggggtaaattctgctgcctgacgttgcagctcgccgagatcgtcgctcaccagttgcaggtcagccatcgggttatcgacgcgcgcgttggcatctacagccaggcattgcgctttcagcgcctcgcgcagggcaatcgcttcacgagcgtagccgacaatacgcggagaatcgaagttaacgttggtcagggttgagaaaaaggcacgtggcgcgaagctgtcaacatcgtggttgatgatgccgtattcacgcgcttttaccgcccaggcagaaagcccttgcagcgccgcgatgagtaaatcctgaaggtcagaagtttccgccgttttaccacacatcccctgcgcgtatgagcagccgtttcctgccggagtacggatagtttgttcacattgcacacaaaacatgatcacaccttttaaagttatatttaatatacatgtttaaggttaagacgcttaacgcggggataaaagggatttttcatgcaactttaagggagattgatttagcgcaattttggcggcagggatctaccgccagagaggtattacgcagagaaaaaggcgatgaggatcggcactaacaggctaagaataaaaccgtgaacaattgccgccgggaccatatccagcccgccagtacgttgaagaacgggcagggtgaaatccattgatgtggcaccgcataagcccagtgcagtagagcggctgcggcgaatcagcccagggatcaacataatagcaatcagttcacgggccagatcattaaaaaacgccgcgctcccgattaccggaccaaaagattcggtcaataaaataccggaaagagaataccagccgaaaccggaggccattgccagcgcggtattgatggggagatcaagaataaaggcgttaattaaaccaccaattaatgaactgacaaccaccaccacggcgacaatcattccccggcgattaaggacaatctgctttaaggtcatgccattattgcgcaactgaataccaacgaggaaaagtagcaaaattaacgtgtattcactggcttcggtcgcgtgttgtaagaaagccagtccacttagaccaatggcaaaaccaatcactactacgccgcacagttttagcgactccagcgccatcgcaatacgcgacgggagtttttcttgctgatggtggttgcgccacggcaggcctcgctccagccacatcagggcggcaatattacacagtaaaataacggtaatactgacggcagaataatgcagaatcgccaacaggttactggcgaggttatcgagaaacgccagactgatacccataaaaaagagaataaggtaaaccatccagcttaatagctgattaataacttttaacgcagcttgttggcgaagcggaatgaggtaacccacaatcaggggaaccagaatgattaacagcccagaaaacatgaaaacccagtccttgcaaagatgaagtcgaaatgcgcgatgacacactactgaaagcggaaggacgagtaaagttgcaattaaaaggaaatgttatgcataaggagcagtagagtattcgttttcatttaaagatattcttgcgctttaattacaaactgcaccgatgttggtggcgtcaaaatcgccgaggcgttccctgaaggccggggcagcccacatggatgtgggctgagggcgcgttttacagggatgttacctcgcgcccgacccggtagccgtaagggataagtcgagggcaccgcgcagcggcgattggccgccccctgcgcgctccttgcgccagtggcaatatgttgcttagctcatgaaaggagcgcaacaagatgatgaatcaacatataacaacatcttaaaaaaaggcctgacattacgccaggccttctgcgttaattaatcacgcttttccagcagggtccggtaaatcagaccaccgataatgccgccgacaattggcaccacccagaagaaccacagttgttctaatgcccagccgccctggaagatagcaaccgcggtgctgcgcgccgggttaacagaagtgttagtcaccggaatactaattaagtgaatcagggttaaggccagaccaatagcgatcggcgcaaaacctgccggcgcgaatttgtcggttgcgccgtggatcaccaacaggaaacctgcactcaataccagttcaactaccagcgcggaaagcatggaataaccgcctggtgaatgctcgccataaccgttagaagcaaaaccgctggctgccgcgtcaaaacccgttttaccactggcaattaaatacagcagcgccgctgcaacaataccgccgacaacctgggcaattacgtagccaacgacttcttttgccggaaaacgtccgccagcccataaaccaatagtgaccgccgggttaaaatgaccaccagaaatatgaccaacagcaaaggccatcgtcagaacggtcagaccgaacgccaacgccacgccggcaaaaccaatgcctaattccgggaagcctgcggccagtacagcactaccacagccaccaaaaacaagccagaaagtaccaaaacattcagctgctaattttctgaacatatccacctcaattaaaaattgaccctgtgaaaaatatggtcgttttatagggtcgtcgtaaaaaagtgacgacggaaataatgcgcggctattttaaaaacgaaggcgagtcattcaccagataaataaatccagtaaatttgatttagggcaacagcgggttgccccatatagtcatttgtctgattgacagtgtagtgcacgcaaaagatttaatcctttaggcgtaataaaaaataatttatcatgctaattatttgattttgttgtttttgcagacttatcagcaagagggagtataacgcgattattcgctcatttttcagacatttgccatgcttaaatgtgatgtcatcacgtattagcaaggcctttcccgttatactgccagcgtaaaggataagtcacatatttctggaggggatatgattcttgagcgcgttgaaattgtgggttttcgcggtatcaaccgtttgtcgttgatgctggaacaaaacaacgtcctgattggggagaacgcgtggggtaaatccagcttgctggacgccttaactctgctgctatcgccagaatcagatctctaccattttgagcgcgacgatttctggttcccgccgggagatatcaacgggcgagaacatcatctgcatattattttgaccttccgcgaatcgctgccaggccgacatcgggttcgccgttatcggccgctggaagcgtgctggacgccatgcaccgatggctatcaccgtattttttatcgtctggaaggggagagtgcggaagacggcagcgtgatgacactgcgcagttttctcgataaagacggacatccgattgatgtcgaggatattaacgatcaggcacgccatctggtgcgtttaatgccggtgctgcgcttgcgtgatgcccgttttatgcgccgtattcgtaacggcacggtgccaaatgtccctaatgtggaagtcaccgcgcgccagctcgatttcctcgcccgtgagttatcctcacatccgcaaaatctctctgatgggcagattcgtcagggactttccgcaatggtacagctgcttgagcattatttctctgagcagggggccggacaggcgcgatatcgtttaatgcggcggcgagccagcaatgagcaacgaagctggcgctatctggatatcatcaaccggatgattgaccgacctggtgggcgctcgtatcgggttattttgctcggcctatttgctactttgttgcaggcaaaaggcacattgcgactggataaagacgcccgtccattgttgctgatcgaagatccagaaacccgtttacaccccattatgctttcagttgcctggcatctgttgaatcttctgccattgcagcgcattgccaccaccaactcgggtgagttgctttcgttaacgccggtagagcatgtttgccgactggtacgtgagtcctcgcgcgttgccgcctggcgtctggggccgagtggcttgagtaccgaagatagccgacgcatatcctttcacattcgttttaaccgtccgtcatcgctgtttgcacgctgctggttgctggtggaaggggaaacggaaacctgggttatcaatgaactggcgcgtcagtgcggacatcattttgatgccgaagggatcaaggtcattgagtttgcccagtccgggctaaagccactggttaaatttgcccgccgaatggggattgaatggcatgtactggtcgatggcgatgaagcagggaagaaatatgccgctacggtacgcagcctgttgaataacgatcgggaagccgaacgagaacatttaacggcgttaccggcgctggatatggaacattttatgtatcgccagggattttccgatgtgttccaccgcatggcgcaaatcccggaaaatgtaccgatgaatctacgcaaaattatctcgaaagcgatccatcgctcttccaaacccgatcttgccattgaagtggcaatggaggcaggacgtcgtggtgtggactccgtaccgacgctgctgaaaaaaatgttctcacgcgtgctgtggctggcgcgcggtcgcgcggattaaccgcgaaacatcgtggccatttgtggctgaatagcgtcgagcatctcatagcgccgacggtattcagcccgttttttactggcgatttcggcaatctcttttcgtgctatctgtgctggaaggcggtaatggcgttcagcatcacatacgccgccaaccgattcccagaaagcgttgtaatcagcgtggatcttgccttctttatcgcgataacgcaggctgcggtaaatatgcgtttcattgctgacggcaataatctgctctacctgcaaacgttgggcaaacagacaggccgcttccatcacgaggcgtttgggaaatagcccgtggcaggctttcgtcgcattctggatttcctgatgtggaatttcccattttgcgccttgcagtccgccaataaacatcgttcttttcccctgatattcacacagggtaaacgtgatctctgccagaggaataccttcgctgttgcggaacaggattgtgctgtcaccttctttatccattgagatcatcatggtcagctcaagcgtgaactgctcgccgtttttgccttccagcttcgccagttgcagcccgggggtattcaaatataagctgaattcttccgccgacatacattcgcggagtaacgcataatggtaacgtaacgcctccagcaattgcttacggctaagattcgccgcaaggtaagggcgatgcagacgcacaggcagtcgcggctggcgcgttaacaatacattgagattaggccagtgggaaagttcgttcatccactcaacgcttaaacgcggcataatcaacgagcgcagcaaaaatttctggcgaaaactacggcgatgccagaatttacccggccgacactgtccacgtgccagactaagaaaaagtgacaggctgctgagagattcagatggcgtaaaggtccgttcagttagctgcgacatattcatgaaatcaatggttatacatggcgtcgatttcaccattgcgtatcttaaccaaacatcaatagtgtgattactaacgtaaattttagggttttgttgatatttcgttgaagttaatgacccggattggcatatggagtattcagaaaatttatgaaaaagcggaaaaccgtgaagaagcgttacgttattgcgctggtgatagtcatcgccggactgattacgttatggagaattcttaacgcacccgtgccgacttatcagacgctgattgtgcgccccggtgatttacagcaaagcgtgctggcgaccggaaagctggacgcgctgcgtaaggttgatgtgggcgcgcaggtcagcggtcagttgaaaactctgtcggtggcgattggcgataaagtaaaaaaagaccagcttttaggggttattgatcctgaacaggctgaaaaccagattaaggaggtcgaagcaacgctgatggagctacgtgcgcagcggcagcaggcggaagcggagctgaaactggcgcgggtgacgtattcccgtcagcaacgtctggcacaaacgaaggctgtttcacagcaggatctcgacaccgccgcgacggagatggctgtgaaacaggcgcaaattggcaccattgacgcgcaaatcaagcgcaatcaggcttctctcgatacggctaaaaccaatctcgattacactcgcatcgttgccccgatggccggggaagtcacgcaaatcaccactctgcaaggccagacggtgattgccgcacaacaagcaccgaacattctgacgctggcagatatgagcaccatgctggtaaaagcgcaggtttctgaagcggatgtaatccacctgaagccggggcaaaaagcctggtttacggtgcttggcgatccactgacgcgctacgaggggcaaatcaaggatgtactaccgacgccggaaaaggttaacgacgctattttctattacgcccgttttgaagtccccaaccccaatggtttgctgcggctggatatgactgcgcaagtgcatattcagctcaccgatgtgaaaaatgtgctgacgatccctctgtcggcgttaggcgatccggttggcgataatcgttataaagtcaaattgttgcgtaatggtgaaacacgcgagcgtgaagtgacgattggcgcacgtaacgataccgatgttgagattgtcaaagggcttgaagcgggcgatgaagtggtgattggtgaggccaaaccaggagctgcacaatgacgcctttgctcgaattaaaggatattcgtcgcagctatcctgccggtgatgagcaggttgaggtgctgaagggcatcagcctcgatatttatgcgggtgagatggtcgcgattgttggcgcttcgggttccggtaaatcgaccctgatgaatattctcggctgtctggataaggccaccagcggcacctatcgcgtcgccggtcaggatgttgccacgctggacgccgatgcgctggcgcaactgcgccgcgagcatttcggctttattttccagcgttaccatttgctttcgcatttaaccgccgagcagaacgttgaagtacccgccgtctatgctggtcttgagcggaaacagcgactgcttcgtgcccaggagttgctgcaacggctggggctggaagaccgtacagagtattatccggcacagctttcgggtggtcagcaacagcgcgtcagcatcgcgcgggcattgatgaacggtggtcaggtaattcttgccgatgaaccaaccggcgcactggacagccattctggcgaagaggtgatggcgatcctgcatcagctgcgcgatcgtgggcatacggtgattatcgtcacccacgatccgcaggtcgctgctcaggccgagcgggtgatcgaaattcgcgacggcgaaattgtgcgcaatcctcccgccattgaaaaagtgaatgttactggcgggacggaacctgttgtcaacacggtgtctggctggcggcagtttgtcagcggttttaacgaggcgctgacgatggcatggcgggcgctggcagcgaataaaatgcgtactttactgaccatgctggggattattatcggtattgcgtcggtggtttccattgtcgtggtgggtgacgccgccaaacaaatggtgctggcggatattcgttctattggtacgaatactattgatgtctatcccgggaaagattttggcgatgacgatccgcaatatcagcaggcgctgaagtacgacgacttaatcgccatccaaaaacaaccgtgggtcgcctcagccacacctgccgtctcgcaaaacctgcgcctgcgttataacaatgttgatgttgctgccagtgccaatggcgtgagcggcgattattttaatgtctatggcatgaccttcagtgaaggaaacacctttaatcaggagcagctgaacggtcgtgcgcaggtcgtggttctcgacagtaatactcgccgccagcttttcccccataaagcagatgtggttggcgaggtgattctggtcggcaatatgcccgccagagtcattggtgtggcggaagaaaaacagtcgatgtttggtagcagtaaagtgctgcgtgtctggctaccttacagcacgatgtccgggcgagttatgggccagtcgtggcttaactccattactgtcagggtgaaagaaggatttgacagcgccgaggcggaacagcaactcacgcgtttactttcactgcgccacggaaagaaggatttctttacctggaacatggacggcgtcttgaaaactgttgaaaagaccacacgtactttacaactgtttctgacgctggtggcggtgatttcgctggtggtgggcggtattggtgtaatgaatattatgctggtgtcagtgaccgagcggacgcgggaaattggcattcgcatggctgtaggtgcgcgagcaagcgatgttttgcaacagttcctgatcgaagccgtactggtttgcctggtcggtggcgcgttgggaataacactgtcactgttaattgctttcaccttgcagcttttcttacccggctgggagattggtttttcaccgttggcgctgctgctggcgtttctctgctcgacggtcaccgggattttatttggctggttacccgcacgaaatgcggcacgactggatccagtagatgctctggcacgagagtaatttttgagataaaaatgccagccgatcgggctggcattttgcctttaggatgtacacaatgagacagaagagctatgcgactgccgcttctacttcgacgggcacaataacactggcgtgattgccttttggcccctggtggacatcaaactgaacggattgtccagcttttagcgttctgtaaccatccatctgaatggtggaataatgagcgaaaatatcttcgccgccgccttcagggcagatgaaaccaaaccctttggcattgttgaaccacttaacagtacccttttccatgcttcgacatccttcgcaaatcttatacaagtaagatggaataaaccggggtcagagagggggctgttcaaaacctcgccaactctagaaatacaatttagagaattagggcgagccgtcaagcatttgacaggggacaaggggcaggtatgaatcaaaaatttgaagcagttaacgctattgacaggaatgtgacagatgtcgctgatgccaacgatagatgatagttatctatcatgtggagtagattggtcaggcaaataagctcttgtcagcggcagggcgttctgccgataaccgtaaccgaagatgataactgacaatgggtaaaacgaacgactggctggactttgatcaactggcggaagaaaaagttcgcgacgcgctaaaaccgccatctatgtataaagtgatattagtcaatgatgattacactccgatggagtttgttattgacgtgttacaaaaattcttttcttatgatgtagaacgtgcaacgcaattgatgctcgctgttcactaccaggggaaggccatttgcggagtctttaccgccgaggttgcagaaaccaaagtggcgatggtgaacaagtacgcgagggagaatgagcatccattgctgtgtacgctagaaaaagcctgaatgcaggcataaaaattgggggaggtgcctatgctcaatcaagaactggaactcagtttaaatatggctttcgccagagcgcgcgagcaccgtcatgagtttatgaccgtcgagcacttgttactggcgctgctcagtaacccatctgcccgggaggcgctggaagcgtgttctgtggatttggttgcgctccgtcaggaactggaagcctttattgaacaaaccacacccgttctgcctgccagtgaagaggagcgcgacacacagccgacgctgagttttcagcgtgtactgcaacgtgcggtcttccatgtccagtcctccggtcgcaatgaggttaccggtgcaaacgttctggtcgctatctttagcgaacaggagtcgcaggcggcatatctgttgcgtaaacatgaagtcagccgtctcgatgtggtgaactttatctctcatggcacgcgtaaagacgagccgacacagtcttctgatcctggcagccagccaaacagcgaagaacaagctggtggggaggaacgtatggagaatttcacgacgaacctgaatcagcttgcgcgcgtgggcggaatcgacccactgattggtcgtgagaaggagctggagcgtgctattcaggttctctgccgtcgccgtaaaaacaacccgctgctggtgggggaatctggtgtcggtaaaaccgcgattgcggaaggtcttgcctggcgaattgttcagggcgatgtgccggaagtgatggctgactgtacgatttactctctcgatatcggttctctgttagcgggcacaaaatatcgcggcgactttgaaaaacgttttaaagcgttgctcaagcagctggagcaggacactaacagcatcctgtttattgatgagatccacaccattatcggtgcgggtgcagcgtctggtggtcaggtcgatgcggctaacctaatcaaaccgttgctctccagcggtaaaattcgtgtaattggttcgacaacctatcaggagttcagcaacattttcgagaaagaccgtgctctggcgcgtcgcttccagaaaattgatattactgaaccgtcgatcgaagaaactgttcaaatcatcaatggcctgaaaccgaagtatgaagcgcaccacgacgtgcgttataccgcaaaagcggtgcgtgcggcggtagagctggcggtgaaatacattaacgatcgtcatctgccggataaagccattgatgttatcgacgaagcgggcgctcgcgcacgcctgatgccggtaagcaaacgcaagaaaaccgttaatgtggcggatattgagtccgtggtggcccgtattgcacgcattccagagaagagtgtttctcagagtgatcgtgataccctgaaaaacctcggcgatcgcttgaaaatgctggtcttcggtcaggataaagccattgaggcgctgactgaagccattaagatggcgcgtgcaggtttaggtcacgaacataaaccggttggttcgttcctgtttgccggccctaccggggtcgggaaaacagaggtgacggtacagctttcgaaagctttgggcattgagcttctgcgctttgatatgtccgagtatatggaacgccataccgtcagccgtcttattggtgcgcctccgggatacgttggttttgatcagggcggtttgctgactgatgcggtcatcaagcatccacatgcggtgctgctgctggacgaaatcgagaaagcgcacccggacgtgttcaatattctgttgcaggtgatggataacggtacgctgaccgataacaacggacgcaaagcagacttccgtaacgtggtgctggtgatgaccaccaacgccggggtacgggaaactgagcgcaaatccattggtcttatccaccaggataacagcaccgatgcgatggaagagatcaagaagatctttacaccggaattccgtaaccgtctcgacaacattatctggtttgatcatctgtcaaccgacgtgatccatcaggtggtggataaattcatcgtcgagttgcaggttcagctggatcagaaaggtgtttctctggaagtgagccaggaagcgcgtaactggctggccgagaaaggttacgaccgggcaatgggcgctcgtccgatggcgcgtgtcatccaggacaacctgaaaaaaccgctcgccaacgaactgctgtttggttcgctggtggacggcggtcaggtcaccgtcgcgctggataaagagaaaaatgagctgacttacggattccagagtgcacaaaagcacaaggcggaagcagcgcattaatctgattgttaggtaggttggtcaagtccgtaatctcgaaagaggttacggactttttgtttatggggtggaggaggttcagaccctttttttaatgatgatggtaagttgttgataattagtgctgcgggaaggtaaggataaaaaagggtgctgcaggagaatgggatggttttgctttattaacaacgggctaaacgtgtagtatttgagttcactgccgtacaggcagcttagaaattcacaggtaacatactccacccgcccaccatgttcactgccgtacagacagataaaatgcgaaaaaaaagctcgcactttcgtacgagctcttctttaaatatggcggtgagggggggattcgaacccccgatacgttgccgtatacacactttccaggcgtgctccttcagccactcggacacctcaccaaattgttttgctaccaaacctcatgggtggcaacggggcgctactatagggagttggagtaaaacggtcaagaagaattttaatgataattattgtttgctcatactgtaaacaagttgtgcagtatatctacatcgagacaagttacggacttatacttccaaagtacttcatacatatcacaaaataaaaaggccggttaaaccgaccttttactcgttctttctcttcgcccatcaggcggtaaaacaatcagcgactacggaagacaatgcggcctttgctcaggtcgtacggggtcagttcaacagtcactttgtcgcccgtcaggatgcggatgtagtttttgcgcattttaccggagatgtgtgcagtaaccacgtgaccgttttctaactctacgcggaacatggtattaggcaacgtttcaagaacggtaccttgcatttcaatattgtcttctttggccatctaatcctctggggtatcactaccgtaatttgaaccggcaagataatgccgaagttctgtaaataagtaaagatttgcgcgctaaatcgcaacaaacaggttcggcacattactccgaaaacacacggctaagccgcaccaaaagcgcaacgtataagggagcggtgagataaacgatgggcgttacctgacgcgaaaaattccttatcggcagcggggtaatgagcgtaaccaactctgcgaccgcaattataacactctggggagaaatgtgccgaaaacattcattcttgtggtgaaaacaagcatcgtggtacccagaaattattcggcaatcgtccgaggcgcatttgattgagataattaaggtaatcccggcggggaatttcgcaggcaccaagcgatgctgtgtgatcgttaaggacctggcagtcgataagcttaccgccatgaccgataaattcctcacagaataccagaagcgccgttttagacgcattttccatccggctgaacatggactcgccacaaaatagcgttccctgggccacgccgtacataccgccgacaagctcatcttcacgccagacttcaatggagtgggcatggccgagttcgtgaaggcgatggtaggcttcgaccacgccacgcgtgatccaggttccttcttcgcgatcgctggcacagccttcaatgacctgaccaaaagcgtaattcatcgtgacacgatagggcgagcgtttatgaaatcgcttcatactacggctgatatgcagtgattctggccatagcaccgcgcggggatcgggcgaccaccagaggatggggtcgcctggagaaaaccacggaaaaataccacgctggtaagccattaacaggcgcgcagggctaagatcgcccccaagtgccagcaggccgttaggctcacgtaatgcgccttccggggaagggaaggctattgaatggcgagaaagctgaaccaggcgcatgaccgcaaaactccacgcaagtcggatcgttcaataatagcttacaaaccctgcttgaactggtaataacgcccctgtctggcaagcagttctgcgtgagtaccttgctcaataatttgcccgttgtccatcactattatttgttggaaacgagagagtccgcgaagtcgatgggtgaccattaacaccgttttctcacgcatcatttctgcaagcaattcaaggatctggctttcggttgtggcatctaagccttcggtaggttcatccagcaacaccagtggcgcatcatgtaacagcgcacgggcgatagccagacggcgcagttcaccaccggagagctggcgtccgccttcacctaaccaactgttgagacctgcatcctcgagcagcttttccaggccaacgcgacgcaagatctccgacagagcctcatcactactgccaggcgaggcgagtaaaagattatcacgcagcgtggcgctaaacagatgcactcgctgaggaacaacgctgatggtctgtcgtagagccgcttcattcaggctggctatggggctatcgttaagcaaaatctcgccctgttgcgggtcccatgcgcgggtcagcagttgtaacagtgttgatttgccgcatccggttcgcccgagaatcgctatatgttccccggcgtttacctgaagagaaatccctttaagtgcctgttgagattgctccggataagtgaactgaacatcccgtaacgtcagcgaaacgcgatcggcaacacgagtttgggtatcaggaaaggtgacctccggtttttgatccgttaagtcagagatacgtacggcagaggcaatgacttgccccagatgctgaaatgcacccgttactggtgccagtgcttcaaacgcggctaacgcgcagaagacaaacagggcaattaacgcgccgggttgagcattgccgccaacgccgccagacgccatccacagcatcaggatcaccgctaacgcgccaatgagcagcattatcgcttgcgacaatgcggtcagttcagattgacggcgttgcgcttccagccattgaatttctgtattctctagttgcgtgcgataacgatcgctggcaccaaaaatggtcagctcagcttgcccttgcagccaggccgtcagttgttggcgatactgtccgcgaagatgagtcagattttgcccggtgctttttcccgcacgataaaacagcggtggcatcaggaaaagcgtcagtaacataatgccgcccagcgtaaaggcgagggtgaaatcaaggaaacttaacccgattgtcaccaccataatcaccacaaaagcgcccaccagcggcgagataacgcgcaggtaaagatgatcgagcgtatcaacatccgccaccacgcgattgagcaattcgccctgacgatagcgcgccagtccggcaggggagaggggcagcaatttgctgaaggtgtaaatgcgcagatgctgcaacacgcggaaagtcgcgtcgtgacttaccagacgttcaaaatagcgcccggcagtacgggtgattgctgcgccacgcacgcccgcagcgggtagcatatagttgaagctgtacagtccggcaacccccgcaaccgctgaggccgagaggaaccagccggaaagtgtcaacagaccgatactggcgagcagcgtcacaattgccagcacaataccaagacttaacatccatttatgacgtttatacagtgccagatagggtagcaaagcgtgcatttaaatctcctcctgacgatgggccagtaatgtggcgaatgggccaccagccacacttaattccgcgtaacgtccttgctcaataatccggccatcctgcataacccaaatgacatcccagtcagcaagatcttctaactggtgggtgaccattaacgttgtctggcgcagagaggcggcattcagcgcctccattacgcgctgttcactgtgagcatcaaggctggcagcgggttcatccaacagtaatagcgaacagggatttagtaacgcacgggccaccgccacgcgctgcgcctgccccacggaaaggcgggcagcctggtcgccaacaggcgtatcaacgccttgtgggaggagcggtagaaactcgctgacccaggcgttatccagcgctgcttgtaattcttgttcgctggcatcaggtcgcgccagtagtacgttatcccgcaatgttgctgccggtaattgtgggttttgcccaacccaggagagatgtttacgccatgattctggtgataaatcgcgtaattctatcccgttgattcgtagcgatccctgatatgagagaaaaccagaaagcgcgttcagcagtgagcttttacctgaaccgctgcgaccaaccaacaccgcacgttggcctgctggcaaagtaaagttcagcggtccggccagcgttttaccttccggcgacgtgataaacagctcctcggcctcaatggtcaccggatcggtcgatgctaattccgcctcaccacgttgcggatgggcgagcggggtttccataaacgttttcagactgtcagctgcgccaacagcctgggctttagcatgataaaacgtaccgagatcgcgtaatggctggaaaaactctggcgcaaggatcagggccagaaaacccgcagccagcgtcacaccggtatcgtagtgaccaaaatccagctcgccgagataggaaaaaccaaagtagaccgccaccagagcaattgacagcgaggtaaaaaattcgagaatgccggaggataaaaacgccagccgtagcacttccattgtccgttggcggaaatcttccgaagcagaacgaatactttcaatttcagcttcaccacgaccaaaaatacgcaatgtttccatgccgcgcaggcgatcgaggaaatgcccacttaagcgagcaagagcgagaaagttacgtcggttagcatcggcagcccccattccaaccagcgccataaacaacggaattaacggtgcagtgcccagcagaatgagcgccgcagcccagttagaggggaagattgccaccacaatcagcaacggcaccgacactgccagcgccatttgcggcagatagcgtgcatagtaatcatgcatatcgtcaatttgctcgagtaccagcgtcgcccagctccccgcaggtttaccctgaatccacgctggccctgcttgttgcagacggtcgagaacctgacggcggatggcaaagcggatatgctgcccggcgtgataacccacccgttcgcgtaaccagaccacccatgcgcgcagtacaaaggtcagaaccagtaacgtaaagggaagcagcagggcttcacggggaatattctccataatcatatgttgcagaattcgcgccatgaaccaggcctgggcaatgatcaatatgccgctcacaaagcccagcagacgagaaatattcagccaacgttgggagatgacgctttgctgttttaaccagcgggttaactctttttgacgagatttattcattgcacgcttagcaggtgagttatcagaattatttgcagagcaatgttacaacggggaaaaaataaaggcgacccatagtcgcatggtgtcgccttctttacttttgttactgatttgtaaaattattttgcgtcagctaaaccatcgaggtagcgttccgcatcaagtgctgccatgcagcctgtaccggccgaagtaatggcctggcgataaatgtgatccatcacgtcgcctgcggcaaagacgccaggaatgctggtctgggtggcattaccatgaatacccgactgtactttgatgtagccgttttccagttccagctgcccttcgaaaatcgcagtattcgggctgtgaccgatagcaacaaacagaccggcaacgtcgagtgactcgatgttatcgctgttttgcgtatcgcgcagacgaacgccagtgacacccatttgatcgccggtcacttcttccagcgtacggttggtgtgcagaatgatgttgccgttctccactttatccatcaggcgcttaatgaggattttttccgcgcggaaaccgtcacggcggtgaatcagatgcacttccgaagcgatgttagacagatacagcgcctcttcaaccgcggtattgccgccgccgatgaccgcaactttctggttgcgatagaagaaaccgtcgcaggttgcacaagcagaaaccccacggcctttaaaggcttcttcagagggcaggccgagatagcgtgcagaagctccggtggcaataatcagcgcgtcgcaagtgtattcgccgttatcgccattcagacggaacggacggttttgcagatccaccttgttgatatgatcaaaaatgatctcagtttcaaacttggtggcatgttcgtgcatgcgctccattaataacggaccggtcagatcgtttggatcgccaggccagttttccacttccgtggtggtggtcagttggccgcctttttccatgccggtaatcagcacaggttgcaggttggcgcgcgccgcgtagacagcagcggtgtatcccgccgggcctgaacccaggataagcagtttactgtgtttggtcgtgcccatgagatccccatagttgttggcagacaatgggcaggattgtagggaatttacagacgtaaaaaaagagtatgacgattttgttaacaatttgtgcaatcggcagcatcgataagcaggtcaaattctcccgtcattatcacctctgctacttaaatttcccgctttataagccgattaaatgatgaataaacgcccctgttaatgaatatctggcatgttgtactaaaaatcgatgttttgctttgacaatcccctggtgttttgcgaaaacattcgaggaagaaaaaaaacagtattcttatatgcgcataaccatgcatgtaaataccatgtttaccgtgctagtgaaatctacgtatggcgtggacagacgccattcgtgatgtcgatagctgccacaaggcaacggtcttctcaccgtagacccaggcattgcgcgccgtgaatcttcatgatttcggtctatcgtgacgggtagcgactctgaacagtgatgtttcagggtcagacaggagtagggaaggaatacagagagacaataataatggtagatagcaagaagcgccctggcaaagatctcgaccgtatcgatcgtaacattcttaatgagttgcaaaaggatgggcgtatttctaacgtcgagctttctaaacgtgtgggactttccccaacgccgtgccttgagcgtgtgcgtcggctggaaagacaagggtttattcagggctatacggcgctgcttaacccccattatctggatgcatcacttctggtattcgttgagattactctgaatcgtggcgcaccggatgtgtttgaacaattcaataccgctgtacaaaaacttgaagaaattcaggagtgtcatttagtatccggtgatttcgactacctgttgaaaacacgcgtgccggatatgtcagcctaccgtaagttgctgggggaaaccctgctgcgtctgcctggcgtcaatgacacacggacatacgttgttatggaagaagtcaagcagagtaatcgtctggttattaagacgcgctaacacggaacaggtgcaaaatcggcgtattttgattacactcctgttaatccatacagcaacagtactggggtaacctggtactgttgtccgttttagcatcgggcaggaaaagcctgtaacctggagagcctttcttgagccaggaatacactgaagacaaagaagtcacattgacaaagttaagtagcggccgccgccttctggaggcgttgctgatccttattgtcctgtttgccgtctggttgatggctgccttactaagctttaacccttcggaccccagctggtcgcaaacggcctggcatgaacctatccataatttaggtgggatgcccggtgcgtggttggcagatacgctgttctttatttttggcgtgatggcttacaccattcccgtcattattgtcggcggttgttggtttgcctggcgtcatcagtccagcgacgaatacattgattattttgccgtttcgctacgcatcattggcgttttggcgctcatccttacctcctgtggtctggcggcaatcaacgctgacgatatctggtattttgcctccggtggcgtcattggcagcttactaagcactacgctacaaccactgctacacagtagcgggggaactattgcgctgctctgcgtttgggcagcgggcctgacgttgttcaccggttggtcatgggtgaccattgctgaaaaactcggcggctggattttaaacattctcaccttcgccagtaatcgtacccgtcgcgatgatacctgggtcgatgaagatgagtatgaagacgacgaagagtatgaagatgaaaatcacggcaaacagcatgaatcacgccgtgcccgtattcttcgcggcgcgctagcgcgtcgtaaacggttggcggaaaaattcattaatccgatggggcggcaaacagacgctgcgttgttctccggtaagcggatggatgatgacgaagagattacctacactgcacgcggtgtggctgccgacccggacgacgtcctattttcgggcaatcgtgcaacgcagccagaatatgacgaatacgatccattattaaacggtgcgccaattaccgaacctgtcgctgtagcagctgctgctaccacggcgacacaaagctgggctgcgccggttgaacctgtgactcagacgccgcctgttgcctctgttgatgttccacctgcgcaacctacagtagcctggcagcctgtaccgggtccacaaacgggagagccggttattgctcctgcaccggaaggttacccacagcagtcacaatatgcgcagcctgcagtgcaatataatgagccgctgcaacaaccagtacagccgcagcagccgtattatgcacctgcagctgaacaacctgcgcaacagccgtattatgcccctgcgccagaacaaccggtggcaggtaacgcctggcaagccgaagagcagcaatccacttttgctccacagtctacataccagactgagcaaacttatcagcagccagccgctcaggagccgttgtaccaacagccgcaacccgttgaacagcagcctgttgtggagcctgaacccgttgtagaagagacaaaacccgcgcgtccgccgctttactactttgaagaagttgaagagaagcgagcccgtgaacgtgaacaacttgcggcctggtatcaaccgattccagaaccggttaaagaaccagaaccgatcaaatcttcgctgaaagcaccttctgttgcagcagtacctccagtagaagccgctgccgctgtttccccgctggcatctggcgtgaaaaaagcgacactggcgacgggggctgccgcaaccgttgccgcgccagtcttcagtctggcaaatagcggtggaccgcgtcctcaggtcaaagaggggattggtccgcagttgccacgaccgaaacgtatccgcgtgccaactcgtcgtgaactggcgtcttacggtattaagctgccctcacagcgtgcggcggaagaaaaagcccgtgaagcccagcgcaatcagtacgattctggcgatcagtacaacgatgatgaaatcgatgcgatgcagcaggatgaactggcacgtcagttcgcccagacacagcagcaacgctatggcgaacagtatcaacatgatgtgcccgtaaacgcagaagatgcagatgctgcggcagaggctgaactggctcgtcagtttgcgcaaactcaacaacaacgttattccggcgaacaaccggctggggcgaatccgttctcgctggatgattttgaattttcgccaatgaaagcgttgctggatgatggtccacacgaaccgttgtttacgccaattgttgaacctgtacagcagccgcaacaaccggttgcaccgcagcagcaatatcagcagccgcaacaaccagttccgccgcagccgcagtatcagcagccacaacagccggttgcgccgcagccacaatatcagcagccgcaacaaccggttgcgccacagcagcaatatcagcagccgcaacaaccggttgcgccgcagcagcagtatcagcagccacaacagccagttgcgccacaaccgcaggataccctgcttcatccgctgttgatgcgtaatggcgacagccgtccgttgcataaaccgacgacgccgctgccttctctggatttgctgacaccgccgccgagcgaagtggagccggtagatacctttgcgcttgaacaaatggctcgcctggtggaagcgcgtctggctgatttccgtattaaagccgatgtcgtcaattactctccggggccggttatcactcgctttgaattgaacctggcaccgggcgtaaaagcggcgcgcatttctaacttgtcacgggaccttgcccgttcactttcgacggtggcggtgcgtgtcgttgaagttattcctggcaaaccctatgtaggtctggagttaccgaataaaaaacgacaaaccgtttatctgcgcgaagttttggataacgccaaattccgcgataatccgtcgccattaaccgtggtgctgggtaaagatatcgccggtgagccggtggttgccgatctggcgaaaatgccgcacttgttggttgcggggactaccggttccggtaaatctgtcggtgtgaacgcgatgatcctgagcatgctttataaagcacagccagaagatgtgcgtttcatcatgatcgacccgaaaatgctggagctttcggtttatgaaggcattccgcatctgttaacggaagtcgttactgatatgaaagatgccgccaacgcgctgcgctggtgtgttaacgagatggagcgtcggtataaactgatgtctgcgctgggtgtgcgtaatctggcgggttataacgaaaaaattgctgaagccgatcgcatgatgcgtccgattccagacccgtactggaagccgggtgacagtatggatgcccagcatccggtgctgaaaaaagaaccatacattgtggtgttggttgacgaatttgccgacctgatgatgacggtaggtaaaaaagtggaagagctgatagcacgtctggcgcaaaaagcccgtgccgcgggtatccacctcgtactggcaactcagcgtccatcggttgatgttattactggtctgattaaagcgaatattccgacccgtatcgcctttaccgtatccagtaagattgactcacgtaccattcttgatcaggctggcgcggaatcactgctgggtatgggggatatgctctactctgggccgaactccacgttgccggtacgtgtccatggtgcttttgttcgcgatcaggaagttcatgccgtggtgcaggactggaaagcgcgtggtcgcccacagtatgttgatggcatcacctccgacagcgaaagcgaaggtggtgcgggtggtttcgatggcgctgaagaactggatccgttgttcgatcaggcggtgcagtttgtcactgaaaaacgcaaagcgtcaatttctggcgtacagcgtcagttccgcattggttataaccgtgcagcgcgtattatcgaacagatggaagcgcaggggattgtcagcgaacaggggcacaacggtaatcgtgaagtgctggccccaccgccgtttgactaactaatgcatcgtatgccggataaggcgcggtagcgtcgcatccggcactctatcaactgaaaattcagtattttcttctttcctcaagctgattattagcctggaatagagagtagagggaactcccgatcgggagtgacgtaatttgaggaataatgatgaaaaaaattgccatcacctgtgcattactctcaagcttagtagcaagcagcgtttgggctgatgccgcaagcgatctgaaaagccgcctggataaagtcagcagcttccacgccagcttcacacaaaaagtgactgacggtagcggcgcggcggtgcaggaaggtcagggcgatctgtgggtgaaacgtccaaacttattcaactggcatatgacacaacctgatgaaagcattctggtttctgacggtaaaacactgtggttctataacccgttcgttgagcaagctacggcaacctggctgaaagatgccaccggtaatacgccgtttatgctgattgcccgcaaccagtccagcgactggcagcagtacaatatcaaacagaatggcgatgactttgtcctgacgccgaaagccagcaatggcaatctgaagcagttcaccattaacgtgggacgtgatggcacaatccatcagtttagcgcggtggagcaggacgatcagcgcagcagttatcaactgaaatcccagcaaaatggggctgtggatgcagcgaaatttaccttcaccccgccgcaaggcgtcacggtagatgatcaacgtaagtagaggcacctgagtgagcaatctgtcgctcgatttttcggataatacttttcaacctctggccgcgcgtatgcggccagaaaatttagcacagtatatcggccagcaacatttgctggctgcggggaagccgttgccgcgcgctatcgaagccgggcatttacattctatgatcctctgggggccgccgggtaccggcaaaacaactctcgctgaagtgattgcccgctatgcgaacgctgatgtggaacgtatttctgccgtcacctctggcgtgaaagagattcgcgaggcgatcgagcgcgcccggcaaaaccgcaatgcaggtcgccgcactattctttttgttgacgaagttcaccgtttcaacaaaagccagcaggatgcatttctgccacatattgaagacggcaccatcacttttattggcgcaaccactgaaaacccgtcgtttgagcttaattcggcactgctttcccgtgcccgtgtctatctgttgaaatccctgagtacagaggatattgagcaagtactaactcaggcgatggaagacaaaacccgtggctatggtggtcaggatattgttctgccagatgaaacacgacgcgccattgctgaactggtgaatggcgacgcgcgccgggcgttaaatacgctggaaatgatggcggatatggccgaagtcgatgatagcggtaagcgggtcctgaagcctgaattactgaccgaaatcgccggtgaacgtagcgcccgctttgataacaaaggcgatcgcttttacgatctgatttccgcactgcataagtcggtacgtggtagcgcacccgatgcggcgctgtactggtatgcgcgaattattaccgctggtggcgatccgttatatgtcgcgcgtcgctgtctggcgattgcgtctgaagacgtcggtaatgccgatccacgggcgatgcaggtggcaattgcggcctgggattgctttactcgcgttggcccggcggaaggtgaacgcgccattgctcaggcgattgtttacctggcctgcgcgccaaaaagcaacgctgtctacactgcgtttaaagccgcgctggccgatgctcgcgaacgcccggattatgacgtgccggttcatttgcgtaatgcgccgacgaaattaatgaaggaaatgggctacgggcaggaatatcgttacgctcatgatgaagcaaacgcttatgctgccggtgaggtttacttcccgccggaaatagcacaaacacgctattatttcccgacaaacaggggccttgaaggcaagattggcgaaaagctcgcctggctggctgaacaggatcaaaatagccccataaaacgctaccgttaatgttatcgttgcggtaatgttgttactgtatccctgtggtcgcaggctgtggccacatctcccatttaattcgataagcacaggataagcatgctcgatcccaatctgctgcgtaatgagccagacgcagtcgctgaaaaactggcacgccggggctttaagctggatgtagataagctgggcgctcttgaagagcgtcgtaaagtattgcaggtcaaaacggaaaacctgcaagcggagcgtaactcccgatcgaaatccattggccaggcgaaagcgcgcggggaagatatcgagcctttacgtctggaagtgaacaaactgggcgaagagctggatgcagcaaaagccgagctggatgctttacaggctgaaattcgcgatatcgcgctgaccatccctaacctgcctgcagatgaagtgccggtaggtaaagacgaaaatgacaacgttgaagtcagccgctggggtaccccgcgtgagtttgactttgaagttcgtgaccacgtgacgctgggtgaaatgcactctggcctcgactttgcagctgcagttaagctgactggttcccgctttgtggtaatgaaagggcagattgctcgcatgcaccgcgcactgtcgcagtttatgctggatctgcataccgaacagcatggctacagtgagaactatgttccgtacctggttaaccaggacacgctgtacggtacgggtcaactgccgaaatttgctggcgatctgttccatactcgtccgctggaagaagaagcagacaccagtaactatgcgctgatcccaacggcagaagttccgctgactaacctggtgcgcggtgaaatcatcgatgaagatgatctgccaattaagatgaccgcccacaccccatgcttccgttctgaagccggttcatatggtcgtgacacccgtggtctgatccgtatgcaccagttcgacaaagttgaaatggtgcagatcgtgcgcccagaagactcaatggcggcgctggaagagatgactggtcatgcagaaaaagtcctgcagttgctgggcctgccgtaccgtaaaatcatcctttgcactggcgacatgggctttggcgcttgcaaaacttacgacctggaagtatggatcccggcacagaacacctaccgtgagatctcttcctgctccaacgtttgggatttccaggcacgtcgtatgcaggcacgttgccgcagcaagtcggacaagaaaacccgtctggttcataccctgaacggttctggtctggctgttggtcgtacgctggttgcagtaatggaaaactatcagcaggctgatggtcgtattgaagtaccagaagttctgcgtccgtatatgaacggactggaatatattggctaatacccaatttttctgaatctaaaaagcgcctgcgggcgctttttttgtctccctttgataccgaacaataattactcctcacttacacgtaatactactttcgagtgaaaatctacctatctctttgattttcaaattattcgatgtatacaagcctatatagcgaactgctatagaaataattacacaatacggtttgttactggaatcaatcgtgagcaagcttgagtgagccattatgaaaacgaaaatccctgatgcggtattggctgctgaggtgagtcgccgtggtttggtaaaaacgacagcgatcggcggcctggcaatggccagcagcgcattaacattaccttttagtcggattgcgcacgctgtcgatagcgccattccaacaaaatcagacgaaaaggttatctggagcgcctgtacagttaactgtggtagtcgctgcccgctacgtatgcacgtcgtggacggtgaaatcaaatatgtcgaaacggacaataccggcgatgacaattacgacggcctgcaccaggttcgcgcctgcctgcgtgggcgttccatgcgtcgccgtgtctacaatccggaccgcctgaaatatccgatgaaacgagtcggggcgcgcggtgaaggcaaattcgagcgcattagctgggaagaagcctacgacatcatcgcgaccaatatgcagcgcctgatcaaagagtacggcaacgagtctatctatctgaactatggcaccggtacgctgggcggcaccatgacccgctcctggccgccgggaaataccctggtcgcgcggctgatgaactgctgcggcggctatctgaaccattacggcgactactcctccgcgcaaattgcggaaggtttgaactatacctacggcggctgggcagatggcaacagcccgtcggatatcgaaaacagtaagctggtagtgctgtttggtaataaccctggcgaaacgcgaatgagtggcggtggggtgacttactatcttgaacaggcacgccagaaatctaatgcccgcatgatcatcatcgatccgcgctataccgacaccggtgccgggcgcgaagatgagtggatccctattcgtccgggaacagatgccgcactggttaacggtctggcgtacgtcatgatcactgaaaacctggtggatcaggcattcctcgataaatattgcgttggctacgatgagaaaaccctgccagccagtgcgccgaaaaatggccactataaagcttatattctgggtgaagggccagatggcgtggctaaaacgccggaatgggcctcgcaaatcactggtgttccggcagacaaaatcatcaaattggctcgtgaaatcggtagtaccaaaccggcgtttatcagccagggatggggcccgcagcgtcacgctaacggtgaaatcgcaacccgtgctatctcgatgctggcgattctgaccggtaacgttggtattaacggaggcaacagcggcgcgcgtgaaggttcatacagcttaccgtttgtccgtatgccgaccttggaaaacccgatccagaccagcatttcgatgtttatgtggaccgatgccattgaacgtggcccggaaatgacggcgctgcgtgatggtgtacgcgggaaagataagctggatgtgccgatcaaaatgatctggaactatgccggtaactgcctgattaaccagcattctgaaatcaaccgtacccatgaaatccttcaggatgataagaagtgcgagctgattgtggttatcgactgccacatgacctcatcggcgaaatatgctgacatcctgctgcctgactgcaccgcttccgaacagatggactttgcgctggatgcatcctgcgggaatatgtcttacgtgattttcaacgatcaggtgattaaaccgcgctttgaatgtaagaccatctatgaaatgaccagcgaactggcaaaacgtcttggcgttgagcaacagtttactgaaggccgtacccaggaagagtggatgcggcatctgtatgcccagtcgcgggaagcgattcctgaactgccaacgtttgaagagttccgcaagcaggggatctttaaaaagcgcgacccacaagggcatcacgttgcttataaagccttccgtgaagatccgcaggcaaacccactgactacgccatcgggcaaaattgagatttattcgcaggcgctggctgacattgccgctacctgggaattgcctgaaggcgatgtgatcgatccactgccgatctacacgccgggctttgaaagttatcaggatccgctgaacaaacagtatccgctgcagcttacaggtttccactataaatctcgcgttcactcaacttacggcaacgttgatgtgctgaaagcggcttgccgtcaggaaatgtggatcaacccgcttgatgcccaaaaacgcggtatccacaacggcgataaagtcaggatctttaacgatcgtggtgaggttcatattgaggcgaaagtgacgccacgaatgatgccgggtgtggtcgcactgggtgaaggtgcctggtatgacccggatgcaaaacgtgtcgataagggtggttgtattaacgtactgaccactcaacgtccgtctcctctcgctaaggggaatccgtcacatacaaaccttgttcaggttgaaaaggtgtaaggagtaaccgatgacaacccagtatggattttttattgattccagccgttgcaccggttgcaaaacctgcgagctggcctgtaaagactacaaagatttgacgccagaagtcagcttccgccgcatttatgaatatgctggcggcgactggcaggaagataacggtgtctggcaccagaacgtgtttgcctactatctgtcgatttcatgtaaccactgcgaagatccggcttgtactaaagtctgcccgagcggtgcgatgcataaacgtgaagatggttttgttgtggtcgatgaagatgtgtgcattggctgccgctactgccatatggcttgcccgtatggcgcaccgcaatataacgaaacgaaaggccatatgaccaaatgcgatggttgttatgaccgtgttgcggagggtaaaaagccgatctgtgttgaatcttgtccgctgcgggcgctggatttcggccctatcgacgagctgcgtaaaaaacatggcgatctggcggccgttgcgccgttgccgcgagctcactttaccaaaccgaatattgtgatcaaacccaatgccaatagccgcccgaccggggataccactggctatctggcaaacccgaaggaggtgtgagatgggaagtggatggcatgaatggccgctgatgatcttcacggtcttcgggcaatgtgtagcaggtggttttatcgttctggctttggcgctgctcaaaggcgacctgcgagcagaagcccagcagcgtgttatcgcctgcatgtttggtttatgggtgctgatgggcattggctttatcgcctctatgctccatcttggttcaccaatgcgcgcttttaactcgctcaaccgggtaggggcttcagcactcagtaacgaaatcgccagcggttcgatcttttttgccgtaggcggcatcggctggttgctggcaatgctgaaaaagctgtcaccggcattgcgtacgctgtggctgatagtgacgatggttcttggcgtcatctttgtctggatgatggtgcgtgtgtataacagcattgataccgttccgacctggtacagcatctggacgccgatgggcttcttcctgacgatgtttatgggcggcccgttactgggttacctgttgttgagtctggctggcgtcgatggctgggcgatgcgtctgctgccagcaatttctgtactggcactggtagtgagtggcgtggtgtcagtgatgcagggcgcagagctggcgactattcatagttctgtgcagcaggccgcagcgctggtgccggactatggtgcgctgatgtcctggcggatcgtgcttttggccgttgccctgtgcttgtggattgcaccacagctaaaaggttatcagcctgcggttccgctactttctgtatcattcattctgcttctggcaggggaattaatcggtcgcggcgtattctatggtttgcatatgaccgtggggatggccgtcgcaagctaatcataacaaccggggtttcggccccggttctcttttatttctgcttcgttaacgtgtcataactggtcatcaaattacgataatcaggaatgtggttagagaacaacgtcgccagtccttcaatatcattacgccagtcgcgatgcagctcgcacgccacgccgaaccatgtcatcaattgcgcaccagcttgcgacaagcgatcccatgccgaatgccgggtaatttcattaaaggtccctgacgcgtcagtcacgacaaagacgtcaaacccttcttcaatggctgaaagcgccgggaatgccacgcaaacttcggttaccacaccggcaataattaactgttttttacctgtcgctttgacagcttttacaaaatcttcgttatcccaggcgttaatatttcccgggcgagcaatgtaaggtgtatcggggaattgtgctttcagttctggaactaatgggccgttaggaccggtttcaaaactggtggtaagaatagttggtaagttgaaatacttagccaggtcacccagcgccagcacgttatttttaaacttatcgggttcgatatcccgtacaagggaaagtaaaccagcctggtgatcaacaagcaaaacggcagcatcatttttatcaagacgaacatacggtttggtcatcctcttctcctttcgagagtcagtggtacgtctgaaatcgatcagacgcgatgcattgctctgaaagcatagacgggaaatatgagtttgctgtgaccatgaaatttttcgactgaacgaagcgtatgaaatttgtgttagttcaataaaaacaatcagatgagactaatcatctcttcagcattagcgttatgaatgagtaatataaatcgataataccgccgctgggatatcgcgtattttcacccattgacaatgtttttggcggtggcatgatgcgcatgaaatttgaacttcctcacggttttaattcatgtccacgtatacccagcctgtcatgcttttgctgtctggcctgcttttgttgactctggcgattgcggtgttaaatacactcgtgccgctttggctcgcccaggaacacatgtccacatggcaggtaggcgttgtcagctcatcctattttaccggcaaccttgtcggtacattgctgacagggtatgtcattaagcgcattggctttaaccgcagctattatctggcctccttcatttttgccgctggctgtgccggccttggcctgatgattggattctggagctggttggcttggcgttttgtcgcgggcgtcggctgtgccatgatttgggtggttgttgagagcgcgctgatgtgcagtgggacgtcacgtaaccgtgggcgtttgcttgctgcgtatatgatggtttattacgtgggaacgtttttaggccagttactggtcagcaaagtttcaaccgagctgatgtccgtattgccgtgggttacaggtttgacgttggcagggatcttaccgctgttgtttacgcgtgtgctgaatcagcaggctgaaaaccatgattcgacgtcaattacgtcaatgctaaaactccgtcaggcgcggcttggcgtgaatggctgcattatctcaggaatcgttctgggatctctatatggcctgatgccgctgtacctcaatcacaaaggggtgagcaatgccagcattggtttctggatggcggtactggtcagtgcgggtatccttggacaatggccgattggacgtctggcggataagtttggtcgactgctggtgttgcgtgttcaggtctttgtcgtcattctcggcagtatcgcgatgcttagccaggcggcgatggccccagcgttattcatcctcggtgccgctggctttacgctatatccggtggcgatggcatgggcttgcgagaaagttgaacatcatcaactggtggcgatgaaccaggccttactgttgagctatactgtgggaagtctgcttggcccgtcatttaccgctatgctaatgcagaatttctccgataatttattgtttatcatgatcgccagcgtatcgtttatctatttgctgatgctgctgcgcaatgccggtcatacgccgaaacccgttgctcacgtgtaaatgaattcaagcagagtgtgaacttactgtttcacactctgcttttttgtttcttctatctgacttgctttattccaaattttattcgtttaaaaataaaatgtgcagcaggttataattttgcatttcgctatttccgcacttcttatttgccgcgcataatccctcgttttacagatgcccctttaattttggcgaaggatttgtctatggctgggaatgttcaggaaaaacagttgcgatggtacaacattgcgctgatgtcttttatcactgtctggggttttggcaacgttgttaataactatgccaaccaggggctggtggttgttttttcatgggtgtttatctttgcactctatttcacaccttatgcgctaattgttggtcagttaggctcgaccttcaaagatgggaagggcggggtcagtacctggattaaacacacgatgggacccggactggcttatctcgccgcgtggacctactgggtggtgcatattccctatctggcacaaaaaccccaggcaattctgattgcgctcggttgggcgatgaaaggcgacggttcgctaatcaaagaatattcagtcgtagcgttacaggggttaacgctggtgctgtttatcttctttatgtgggttgcttcacgcggtatgaaatcgctgaaaatcgtcggttctgtggcagggattgctatgtttgttatgtcgctcctgtatgtggcgatggcggtaaccgcgcctgcaattactgaagtgcatattgcgaccacaaacattacctgggaaacgttcattcctcatatcgactttacctacattaccactatttcaatgctggttttcgcggttggcggagcagagaagatttctccttacgttaatcaaacgcgcaacccaggaaaagaatttccaaaagggatgttatgcctggcggtgatggttgcggtttgtgccattctgggctcgctggcgatggggatgatgtttgattcgcgtaatatcccggatgacttaatgaccaacggtcagtattacgcctttcagaagctgggcgagtattacaacatgggtaatactttaatggtgatttacgccattgcgaataccctgggacaagtagcggcgctggtattctcgattgatgccccgcttaaagtgctattaggtgatgctgacagcaaatatattccagccagtttatgtcgtaccaacgcttctggtacgcccgttaatggctattttctgaccctggtactggtggcgattctgattatgctgccgactctcggcattggtgatatgaacaatctctataaatggctgttgaaccttaattcggtagtgatgccgctgcgttatttatgggtatttgttgcatttattgcagtcgttcgcttggcgcagaaatataaaccagaatatgtctttattcgtaataagcctctggcaatgaccgtcgggatttggtgttttgcctttaccgcctttgcctgtttgacggggatcttcccgaaaatggaagccttcactgcagagtggaccttccagttggcgctgaatgttgcaacgccgtttgtgctggtaggattaggactgatattcccgctgctggcgcgtaaagcgaatagtaaataattattgtggtcggtgacgctgactctggcagatctgacccgtttttacataatcgagaaatgcgcgcaagccgcaggacatatactggcggtttggataatagatctggaagcctggacgctctgtgctccagtcttccagtacacattctaaacgaccagtatcaaggtactccttgatctgttcatagagcagatacccgataccagcacccatcaaaacggcctccagttcagcatcaacatcatccagaatgatatttcctgcgacagcaatttccagctcctttgcaaattgccagtggaaaggtttgccgctgggataacgaaaaacaacacattgatgattaagcagatcatgaggatggcggggtttgccatatcttgcaaagtactctggcgttgctgctacacataatttcactggctgaggcgcttcacaaaaagcgcgaaagcatctcacaaaaagcgcgaaagaaaagaacaaaaacaacagaataaaaaatcggccatattgaattaatatgctgctattttgtgacatacagcatatatttaactttgttctacactggtaacccctgcctgggcactaagtctgacgccgggttgatccactctgacgcttttcacgcgtgcatcaccttccaccaccacacggatttctccctgcaattgctgtggtacgaatggcgcgttctgtgtggattgcagaacatcccacggagatggagcggcgatgttctttttctccagagagttaaaccagttcttaatatccgtccataccgtcgggcggttgttgttttcctgaacccgtgcgattaacgcgtcagcttcctctttatttttggggaaagcagatagcgccatgtcaaggagattaaatcctgataccgtttgtggtgtaaccagtgttggcgtctttggtccacggggattgcgtgatgaatccggcgcatccggcaagccactggtattaccattcatcccaccgctgcccatattgaccacatacactggcatcacgccagaaccgaaaacatccgtaatactgccgggtatccctttgcctttccctttgggattcattatgtcgtggatggttttaccgagcttgtacgtcttacgcacggcgataatgccgcccacagcaatagccatgtatttggcaacctgtagccagttctggacagtattctggtcgacactgttgatggcatcagccagttcctgaacaggttttgccagttggttgtgggagaattttttccagctggtttccagcgcctgcatggaagacgtaaagtcctgtgcggcatatgcggcatccttcatgatgccttttccatcaccgacgactttcatatagcgttgcaggttttctgcgcctttaccggacgttaccgatttgattaacatttttgcgtcatcaagaaatccggcttcatccagtcgtttggattgtatttccgagcctttgattcccgagcgggtggcaatctcctgaagaagaacgggcaatgaacgcatatggccttcgctatcgaatacgttaatgccattatgcttaagcgttttgacgactttcgggttctgcaaatcttttatgaaattttccaccgttgtggccgctgtatcacggttcccggtggcatccacagcagattccattacaacaccaaactccttgaccccctttacgccccgtccacccgcagcggcatacagcgacatcccacgggtggatttttctgcaaagtctttcagttcataggcaccttcttttcccagcaggttcagggtatccattgctttcagcgagccgtcttcatccttaatgccaaacttcgtaaacagagaaaacagcgaaccgatgaactcgccttcacttcctgaagccgcgatggaggccgccattacatccttgttcttgatgccaaactcaatctcgcccgtcacggtgccgactttttccactgcgcttatcagttcactgtcatcaaccttaaatttgatggcggtgtcctgaataccattcagcatctgtgccatttcgtcgcgcgtcttttctgcggcaataccaatacgggtcatccggcgatcaacctgtgcaaactcacgcatcatggcgctacctgcaaaacctgcaatcatcgctgtgtaacgattacccagcatatcaaggccacgcgtggcggattccgttgtggccttgaccagccgcattgccttctgatggttacgggcgaactgcgacatatttgcgccgtactgtcgtgctttagcggtaagatttcccgtaagatttatcagtatttccgtgcttagcttattactcattatattccccatcaaaaccggaggggaaatcccctccgaattatcaaataaatggtgaaacaataatttccacgcgtttataatttggattgtcttccccgttatccagatactgacgtaacagcaatttttccgctgcggctcttaacgatacggggactacaataacagtaggcacgattcccaatggttcaccgctacttcccttaacggataacatcccgtcgtacacttcattaaatgtggtttcattcagcgtatcccatgatgccgctgcgcattgccacattgcatatccaacgttaagacgcccatcaacaccaaacagaaaacgattattcagaaacacatcggtagcgccggaatcagtaacagaagttacagccattggacgacgaacctgataaataaaaggtttcaatccctgactaccatcaaataagtaccataacggcgttgcatctgcattttttgctggattgcttccatagaggtttgaataaacgccttcaccattaggatggtcagtagcaaagaagttatgcccatcaattccttctgataagtgccctttcttcatagcttcaaacagtaacttatcagggaatgcagccgctttgcgcccgtactgttcaaaaaccattgaatacttaccataatcattatcttcaaaatcctcacgtttaatttgaatgctgctttcaaacgttttatttttcagaaaataatcacgggttgacagtgattttaactgtcggtcgtttaaccactctttgatttccgggaagtcttcgaggaagccataagcactaactgccgatgaagacgttacttctgaagcaatcgttggatgtacaggattgtaggctttttttcctgattcaaacttggcattaaaagcgatagtagcatcagcaattacacaattaatatctttcattttcttttcctaaagctatcaaatagtcttcttcgcttacacctgtaatgcggcaaacagccagttgcgattcagtaagcgttctcgggggttctttaccttttacacttacaggcctggcaaagtgtaaaaaattactcgtcgatttttcctgcatatcagcaaacttcctgaatgcattttctccaacacttgagcacatggacagaagaatatttcgctgggccggacagaaaacggctttttcgatatattcatttacaatctgactatgttgttcagcttgtcttttatttaacgctgtcagcacttcttcaagtgaattaacttcctccatattaagtgccagtgcgattttgctaagtgtttgctgagtattcagcgcagtaagtttcagatttggtttattcgttaacgccacactaacgagttccagtatttcaccatcctgagaatgacggaaagctggtgaaaggtatcggtattcacgggatgtaatggaattcattgcccgtggagtccattcaactcttccccatacagaaccatcattacggacagcaacgtcattaatccatccggcggcaggagcctcgccaccttttggtgcaatcacttctgtagagtgttcataatcgaccacaagtgacattccgcgacacgaaaacgcctgtttaatgctttgtggatctttaagtgtccagttccttccgtcacgcccttcaatttccggtcctgctggcagtaactcaacccattctggaggagtcttatcacccgataaatcagtgcataaagcgattatattcattagttcctctgtcatggaggcaaaacccccttcaaaaccccttcaaaaacgccgtagcaccttcaaaaaggtgcagggcacccagaacaccgccgataagacaaaacaacatcacagcgtgtttcagtggcttttctccttgtctataccaaaatcatcaaattgggaaacaaacatacttgcttcattcatcatttccgtaacctgatctactgtaatggagtaggctttggctgctttatctgctccaaatttttctgcatatgcagcaactttagaaataaaaataattccggatgaatcaatcgcatactcaggtatgaaactacatccggtttgtagttccattatttttaatatgacccgaccaataaatgataaaccattaatttcatgctctggatttaaaccaatatcattacatgattcaataactgcacgttctacaagttttaactcttcaggaagattacttctcattacatcaacaccgaggctcagacctgtttgtaatatgtgtgcattatttatgttaactttgctcatgattaccaataaccgctcctacatgttttattgttgtgtatatcgatttaccagactccccatatttaatagccagttcagcaggagacataacataactatctgcatatatatttgcttttttcattattctactaagtgagtcggctttaggtaagtaaaactgaattccacctacaacttccagaaatgcctttgttgcaatgaatatttttgtcgtgctgtttacttcttcttgtgggtctactccaattttttttaatgctgcctcaatagcgcccataatcatggtcacactttctggaagaatctttgtttcatttttcaataaagcgataatagcagttttgcggatatgcttaaccgggccaccactaaaaaaatccggttcaaatttcattacatcaagatagaatgtctgttttccgcaaacagacataaattcattaaagagagcagtgcctgcgacattacaaaaaacatcaatttcgcaaccacatccctgttcatgttttactgcgtgaaattgtttttcaatcaatttcacatgctcactgacttcattataattacatgcatatcccattttaccgatataagacataacatcacaaatatcacgagcaaagcatgaagaaacaatgaatttatttatcgctgtaatatcattgtgtggcggcgttaacatgagatctttaaaggtttgtttagccattatcttctcgcttaagcttttgcatatacctgtgtacatttgagcgcgatgcgcgatagccaatgcttgcagcaaacttaacgttatccgcaatgttacgataacgattattgcggatatgggaatcaaaaataagtttatccccgattgtgataaaacataattttttcaaaaaagaaccatctccgtttgctctggatgctgtgagattacacgggatttttggggaagatagatttaccgttttccatgaagtatgcacggatatatgcagcaagtggtagacaataaaaaagccgcacgaggcggctttggggtagttaatttttttcgataacctctaacacttgttcaagtctggtccctaatctgtctatctttgattcaagtttatcaagtctcctgtgtagttcggcatgcttataacggcgagacgcttctccatgcttcctggctaccgaaacagcattgactaaactaatcgcatatctgctcaagccggctttggataggaccagttctgaacaccctgctattactatatcctgatttatgatatttagaatttcagtctgagaatacttgcgcgagataagcattttatcaagcttcctttttatcttttcaggcagcaattcaatttttgaaagtctgccgcgtttgttcttctgtaagttttccattttccgcctctgcgattacgcctctactttcaataaaacgctccgtcagggaaataactttcgttaagtcattgcatgcatcatgtagtattggatgtattgaatcaagagacatattaaacaggcaaatttttgagtcaatgccacgaatataaagcaacaaagaggatagaaaggtttcatatccgccattaccatccaggcatccattgatcccggtaacgccatcattaatatagtcacgcgcctgttttgataaagcagcaacaatatctttaaacagatttacagcaatatcttctctcgatttcgcaacttttttattattccgcaccggaaacttgacaacattattcatgtttaccccctttagaagggatgcaggcagcaaacaccaacacaaaatcacgtgccagcatacgacgggctgttgcttcatcaggtgcgttaatagattcgcggtgtggacggtcgttcaggtcggaacggcgaacagccagaaaatgaaaggtaaattcagagcgtaaagtggttggggtcgtagccatttggcagcctcctcgtgcaaatttaaggagtcaccgcctgagttcctacactcataaggggcggtgacgctggcgggggtaggaataccggcgcacaaggaaaccggccagcctttcggctgccccaccagcgccaccatagatacggtgtaccataagccactgaatgcaggtgcgctgatattacgacaataaaaaagacgcttggcgcgtcttgtgtcgccatgtgcttacacgggttcctacgcccgacactcgactttatcgagtgcttttataagttatcaacaataaaattggttggcaagtgtttatgcacgtccgacacatattgcatagatatgcaatgcgctactttacacccatgtatcatgtaatattcactaacgcattgattttaaataaaaacatttaaattcatgatgcatcaacaaagtttatagtaaattctgttatcagacacctatgccccaccttaaaccagcttcaaatgcagtattgaagcggttttgaacatatttgaagactttatacaatcaaccatcttttcgcctctttagtgaaacaatcacgtaatcctttcattttttcgtgtttcacagaaatgaagggataactttaccaacacatatctttgcactaacaaactgctgatacaaaagatttttcactccaatctattcccgtctttactaacctaatcccggattattcttttcgtatttatcatgaaccatcacactggcgggccgatcgccacgctgatcatatctttttcgacgatgcaactaagtcgaacgccagcgtcaaagccctgttggacgatatcgacaagagagtcgtcagttgtgagctcgactttaatatcaggatattcacgtgtgaaaccaaccagtaaagacattaaaaatatacgtgcagctacccgggcggcattgattttgagcgttcctgtcggtgtcagacgaaaatcattcatctcatctaacatgatctgaatttcgtcgaaagctgggcgcaatcgttcatagagattagaacccgcttccgttaacgatacgcttcgggttgtccgattgaataagcgaattttaagacgttgttccagtgttttaatactatggctaatggcggacgaggataagcctaactcatcgcccgctgcacgaaagctttgattacgggccacggcaaagaaagtggcaaagtcagacatattcatccgcattagtgaaaatccttcattaactcatcctgaatcatcacgtttacaggattatgccgcctgcgtaaagtgcgctccagaacttaacgtggaggtaaaattatgcagtctgaacgtatttatttggtatgggcccatcctcgtcatgattcattgaccgcacatattgctgatgcgatccatcagcgggcaatggagcggaaaatacaggtgacggaactcgatttatatcggcgtaatttcaacccagtgatgacgccggaagatgaaccagactggaagaatatggataaacgttattctccagaggttcatcagctttattcagagctgcttgaacatgacacgttagtggtggtttttcctctctggtggtacagcttcccggcaatgctaaaaggatatattgacagagtatggaataatgggctggcttatggagatgggcacaaattaccattcaataaagttcgttgggtggcgctggttggaggagacaaagaatcatttgtccagatgggctgggaaaaaatataagcgattatttaaaaaatatgtgcagttatcttggtattgaagatgccgatgtcactttcttgtgtaatacagtggtattcgatggggaagaacttcacgcgagctattatcagtcgttattatctcaggtacgggatatggtagatgcactataagatgtgttaaaaacgctgtagcagaatgaagcgcggaataaaaaagcggcaactcaataaagttgccgctttacggggaaattagaacattaccttatgaccgtactgctcaagaatgcctttcacgcgttccatggtctctttcttcggtggtttaacaccgtcgagtttgtactcttcacccattgccacccatttgtgtttgcccagctcgtggtaggggagaagctcgattttctcaacgttgcccatatcacgggtaaattcaccgaggcgatgcgctgaatcgtcatcgtcagaccagcctgggacaacaacgtagcggatccacaccttcacatttttgttcgccagatatttagcgaactccagcgtgcggtggttggaaactccaaccagattttggtggatctcgtcgttcatctgtttgagatcgagcattaccaggtcggttacttccagcagttcatcaatcaccggatcgtaacgacgaacaaaaccgttggtgtccagacaggtatgaatgccttcttttttgcaggcgcggaaccagtcacgaacaaactcagcttgcaggattgcttcaccgccggatgcggtaacgccgccgccggaagcgttcataaagtggcgataggtcaccacttccttcatcaaatcttcaacggtaacttctttaccgccatgcgtgtcccaggtgtcgcggttatgacaatacaggcagcgcatcaggcagccctggaaaaaggtgataaagcgaatacctgggccgtctacggttccacaggattcaaaggagtgaatgcgaccaataactgacattgcggtgtttctccagatgtggcccatctgaggccgtgttggtgcgcagctcgaaggctacgtcgagtctgttttggcagtcaccttaaagtatagatagctgacaaaaaaggctctcgcgctaaaaaaggccccactttcgtggagcctttattgtacgctttttactgtacgatttcagtcaaatctaattacatagattgagtgaaggtacgagtaataacgtcctgctgctgttctttagtcagcgagttgaaacgtactgcgtagccagatacacggatggtcagctgcggatatttttccgggttttccatcgcgtcgagcagcatttcacggttcatcacgttaacgttcaggtgctgaccaccttcgatggatgcttcgtggtggaagtaaccatccatcagaccagccaggttggtcttacgaacttcgtcgtctttacccagtgcgttcggaacgatagagaaggtgtaggagataccatctttagcgtaagcaaacggcagtttagcaacggaagtcagagaggctactgcacctttctggtcacgaccgtgcatcgggttagcacccggtccgaacggcgcgccagcacgacgaccgtctggggtgttacccgttttcttaccatacacaacgttagaagtgatggtcagaacagactgagtcgggatagcgtcacggtaggtgtgcagtttctgaattttcttcatgaaacgttctaccaggtcaacagccaggtcatctacacgcggatcattgttaccaaactgcgggtattcgccttcgatttcgaagtcgatagccagaccgtcttcgtcacgaatcggtttaactttcgcatatttgattgcagacagggagtcagcagcaacggacagaccagcgataccacacgccatggtgcggataacgtcacggtcgtgcagcgccatcagagaggcttcgtagctgtacttgtcgtgcatgtagtggatgatgttcagtgcagtgatgtactgtttagccagccagtccatgaagtgatccatgcgctccatcacttcatcatagttcaggacatcgcctttgatcggttcagacttcggaccaacctgcattttcagtttttcgtcaacgccgccgttgattgcgtacagcatggttttcgccaggtttgcacgcgcaccgaagaactgcatttgtttaccaacgatcatcgggcttacgcagcaagcaatagcgtagtcatcgttgttgaagtccggacgcatcaggtcatcgttctcatactgcagagaagaggtgtcgatggacactttagcggcgaatttcttgaagttcagcggcagtttttcagaccacagaatggtcatgttcggttccggagacggacccatggtgtacagggtgttcaggaaacggaagctgtttttggtaaccagggtacgaccgtcgaggcccataccaccgatagattcggttgcccagatcgggtcgccagagaacagttcatcgtattccggagtacgcaggaagcgaaccatacgcagtttcatgaccaggtggtcaaccatttcctgcgcttcttgttcggtgatcttgccagctttcaggtcacgttcgatgtacacatccaggaaggtggaggtacgaccgaaggacattgcagcaccgttctgagacttaacagcagccaggtagccgaagtaagtccactggatagcttcctgagcgttggtagccggaccagagatgtcgtagccgtatttcgcagccatttctttcatctgacccagagcgcggtgctgttcagcgatttcttcgcgcagacggatagtctgttccaggtttacgccgttttccagatcagcctgcagagaagtgaactgtgccagtttgtctttcatcaggtagtcgataccgtacagcgcaacgcgacggtagtcaccgatgatacggccacggccatatgcatctggcagaccggtcagaacaccagatttacggcaacgcaggatgtccggagtgtaaacgtcgaacacgccctggttgtgagttttacggtattcagtgaagatttttttgatcatcggatccagttcgcggttgtacgctttgcaggaaccttcgatcattttgataccaccgaacgggataagagcacgtttcagcggagcttcagtctgcagaccaacgattttctcaagctgcttgttgatgtagccagcgtcgtgagaggtgatggtggaagcaacagcggtgtcaaagtcaactggcgcgtgagtgcggttttccagtttaacgccttccattactttgtcccacagggtggtggtcgcttcagtagcgccagccaggaaggactcgtcaccctcgtacggagtgtagtttttctgaatgaagtcacggacgtttacttcattctgccagtcacctttggtaaaaccttcccaggctgtggctaacttttcattaagctcggacatgtaacacctaccttcttaagtggattttttatttactgcgtacttcgacaaccattaatggtggtcgttttcacgcaggtaaatgacccagtatgtcaacccaaccaacaaaccaccaccgataatgttgccgatcgtaaccggaatcaggttatcagtgatgaaattcatcacggtcaggtgagaaaaattttccggtgcagaaccgactgcggtccaaaattccggggatgcgaagtcgcggattacaatacccatcgggatcataaacatgtttgcgatactgtgctcaaaaccgctggcaacaaacatcgcgaccggcagcaccataatgaacgctttgtccatcaggctgcggccagaataactcatccatactgccagacataccatcaggtttgccaggataccaagacagacggcctcaataaaagtatggtgcactttgtggtcggcggtttgtaggacgtttagtccccattgaccatttgcggtcatatactcgccggaaagccacattaaaagtacaaacagcagtgcgccgaccaggttgccaaaatagacatttagccagtttttcgccaactgaccccaggtgatgcgcccactcgccttagcaacaacaatcaacacggtggaagtaaagagatcggctccgcagacaacacaaagaatcagccccagagagaagcaaatgccgccaaccagttttgccatgccgaagggcattgtgcctgtgccagtggttgctgtgatatagaagacgaatgcgattgagatgaaaacaccggcggtaatcgccagatagaaagtcttaagcggatgtttcgttgctttatagacacccgcctcttcggccactttggccattgcagcaggaagtaaaagatcaaaagggttgtcagctttcacactaactctctctttattaagtcggcgacgagatactaacaaagcattatagatgagaaattgatatagatcatatctcgcctggcttataggcccgtaactcgcatggtttttatgcaaatacggagtaaatatttgattatccaaataaaaataaattttaaaaattaacaaatgagttgaattttttccgcatcctccgctaaaacagttaattaaaagggagcatcaggcgaataaagtaacaatatcgatcgtatttattaaatacaaattaccgatatttaaccttataattacaattattttattaatgcaaatatatgtaaagcggggcattaaaaaaacgccccgtaatataactcagactaatcattaagcctacattgcgtaggctatttgattttattttgcccagaatgctgctttggcgcgctgcagcttttcgtaggccttcaacaacgactgatgtgcagcaaacgcgtgcagatcgctatctaccggttgcaggccgtaaaacgccgcttcgccgctcattgccgcactggcggcttctacggcatctgcgccgtacatgcgaacaaacgcattcagatattgcagcggctggcgatcttcttcctgtgccagtaataacaacgtttgcaggcagcgataatagttggcgcgttccggactaaatactgatgagttaaactccatcgtccattcggtccagaccagagcctgttccagatcgccaccagccagcgccagcatggcttttaattcaccgatacgcagggtgtaccaaccgttatccgacccggtcgccagacccaacagctcacgcacgcgggtaaagtcatcaaaaccttcttcatccagttgctcgatgaggttcaggtaatcttctttttcccactcgctgcctggtagcgaaagaatcgtttcacgtaaatggctgcccatactgttattcgcgagccacagatcttcagccggataaatatcggacatgccaggcacgataatacggcaagcataaacgcccagatgctcgtaatcggcaatataaacttctttatcttctttgttgaagatagccatcagtgtggcgaactcttcttccgtggtgccggagaaattccagtccacaaacggataatcggcatcctgcttgaacaggtcccaggagattaaaccgctggaatcgataaagtgcgtttcgaggttggtatgttcagcgacttcttcatcatcgaaggttggcggagtaaacacatccaaatctttcaggccacgaccttgcagcagctcggtcacggtacgttccagtgctacgccaaaatcaggatgcgcaccgaaagaggcaaagcaggtaccgttagcaggattgaacagtaccacgcaaatcaccggatactggccgccaagcgaaccgtcataagcgaagattgggaaaccctccgcttccagcgtttcgatggcttcaactactgctgggtaacgcgccagcacgtctgccgggatctctggcaggctgatgctttcagcaataatgcggtttttcacgtagcgttcgaaaacttcagacaatccctgaacgcgtgcttcgttgcgggtattacctgcggacataccgttggagacgtacaggttaccaatgatattcatcggaatataaacggtctgattgtcggactgacgcgtaaacggcaggccgcaaataccacgatcttcgttaccggattgtaggtcaatcagcatgctgccggtcagttcattctccggatcataaaacgcgcgcagacggtcatcgagcagcccttctggcacatcgtcattttcggtcagtgggaaccatttttcgttgggataatgcacgaacggaccgttggcgatggtttcgcccagccagaagtccgcaaaaaagtagttggttgagagacgctcgaaatattcaccgagtgcagaagccagcgccgctttcttggttgcgcctttaccgttggtaaaacacagtgcgcactctttgtcgcgaatatgtacagaccagacgttaggcacgggattcagccaggaggcctcttcaatctgaaagccgaggtctgaaagtttttgctggaagcgagcgatggaatcttccagagcggcatctttgccggggataaatgtttgcgtcatgaaaatcactttagtcgtacggaaagcgcgcaataatacgggttttatctcaaaggcgctatcaccgccgccatgccgatgaactgttgactatgcttttagcggataaaccacgttaagagcataaaaatgaaggcgttcgatctccaccgtatggcatttgataaagtgccttttgatttccttggcgaagttgcactacgtagtctttatacctttgtactggtctttttgttcctcaaaatgaccggaagacgcggtgtgcggcagatgtcgctgtttgaagttttaatcattctgacgctgggatcagcggcgggagatgtggcgttttatgatgatgtgccgatggtcccggtacttatcgtctttattactctggcgttgttataccgcctggtaatgtggttgatggcgcacagtgaaaaactggaagatcttctggaaggcaagccagttgtcattattgaagatggcgagctggcctggtcgaaactcaataactccaacatgacggaatttgagttctttatggagctacgattgcgtggcgtggagcagctggggcaggtacgtctggcgattctcgaaaccaacgggcaaatcagtgtctatttctttgaagatgacaaggtgaaaccgggtttacttattttacccagtgattgtacgcagcgttacaaagtggtgccggagtcggcggactatgcctgtattcgttgtagtgaaatcattcatatgaaagcgggggaaaaacaattatgtccgcgctgtgcaaatccagaatggacgaaggcaagtcgggcaaaacgggtgacctgacagtaaaaacatcggctttttgctaataatccgagagattcttttgtgtgatgcaagccacatttttgccctcaacggttttactcattgcgatgtgtgtcactgaatgataaaaccgatagccacaggaataatgtattacctgtggtcgcaatcgattgaccgcgggttaatagcaacgcaacgtggtgaggggaaatggctcaaatcttcaattttagttctggtccggcaatgctaccggcagaggtgcttaaacaggctcaacaggaactgcgcgactggaacggtcttggtacgtcggtgatggaagtgagtcaccgtggcaaagagttcattcaggttgcagaggaagccgagaaggattttcgcgatcttcttaatgtcccctccaactacaaggtattattctgccatggcggtggtcgcggtcagtttgctgcggtaccgctgaatattctcggtgataaaaccaccgcagattatgttgatgccggttactgggcggcaagtgccattaaagaagcgaaaaaatactgcacgcctaatgtctttgacgccaaagtgactgttgatggtctgcgcgcggttaagccaatgcgtgaatggcaactctctgataatgctgcttatatgcattattgcccgaatgaaaccatcgatggtatcgccatcgacgaaacgccagacttcggcgcagatgtggtggtcgccgctgacttctcttcaaccattctttcccgtccgattgacgtcagccgttatggtgtaatttacgctggcgcgcagaaaaatatcggcccggctggcctgacaatcgtcatcgttcgtgaagatttgctgggcaaagcgaatatcgcgtgtccgtcgattctggattattccatcctcaacgataacggctccatgtttaacacgccgccgacatttgcctggtatctatctggtctggtctttaaatggctgaaagcgaacggcggtgtagctgaaatggataaaatcaatcagcaaaaagcagaactgctatatggggtgattgataacagcgatttctaccgcaatgacgtggcgaaagctaaccgttcgcggatgaacgtgccgttccagttggcggacagtgcgcttgacaaattgttccttgaagagtcttttgctgctggccttcatgcactgaaaggtcaccgtgtggtcggcggaatgcgcgcttctatttataacgccatgccgctggaaggcgttaaagcgctgacagacttcatggttgagttcgaacgccgtcacggttaatgccgaaattttgcttaatccccacagccagcctgtggggtttttatttctgttgtagagagttgagttcatggaatccctgacgttacaacccatcgctcgtgtcgatggcactattaatctgcccggttccaagagcgtttctaaccgcgctttattgctggcggcattagcacacggcaaaacagtattaaccaatctgctggatagcgatgacgtgcgccatatgctgaatgcattaacagcgttaggggtaagctatacgctttcagccgatcgtacgcgttgcgaaattatcggtaacggcggtccattacacgcagaaggtgccctggagttgttcctcggtaacgccggaacggcaatgcgtccgctggcggcagctctttgtctgggtagcaatgatattgtgctgaccggtgagccgcgtatgaaagaacgcccgattggtcatctggtggatgcgctgcgcctgggcggggcgaagatcacttacctggaacaagaaaattatccgccgttgcgtttacagggcggctttactggcggcaacgttgacgttgatggctccgtttccagccaattcctcaccgcactgttaatgactgcgcctcttgcgccggaagatacggtgattcgtattaaaggcgatctggtttctaaaccttatatcgacatcacactcaatctgatgaagacgtttggtgttgaaattgaaaatcagcactatcaacaatttgtcgtaaaaggcgggcagtcttatcagtctccgggtacttatttggtcgaaggcgatgcatcttcggcttcttactttctggcagcagcagcaatcaaaggcggcactgtaaaagtgaccggtattggacgtaacagtatgcagggtgatattcgctttgctgatgtgctggaaaaaatgggcgcgaccatttgctggggcgatgattatatttcctgcacgcgtggtgaactgaacgctattgatatggatatgaaccatattcctgatgcggcgatgaccattgccacggcggcgttatttgcaaaaggcaccaccacgctgcgcaatatctataactggcgtgttaaagagaccgatcgcctgtttgcgatggcaacagaactgcgtaaagtcggcgcggaagtggaagaggggcacgattacattcgtatcactcctccggaaaaactgaactttgccgagatcgcgacatacaatgatcaccggatggcgatgtgtttctcgctggtggcgttgtcagatacaccagtgacgattcttgatcccaaatgcacggccaaaacatttccggattatttcgagcagctggcgcggattagccaggcagcctgaatgaacaacgggcaataaatagccaaatctttctttatcaaaacgtcggcacattgtcgtaatgccgatcagttaaggatcagttgaccgatccagtggctgtgtaagaatccggaaacgctcacttgtttccggatttttttatgcacattggacaggctcttgatctggtatcccgttacgattctctgcgtaacccactgacttctctgggggattacctcgatcccgaactcatctctcgttgccttgccgaatcaggtactgtaacgctacgcaagcgccgtcttcccctcgaaatgatggtctggtgtattgttggcatggcgcttgagcgtaaagaacctcttcaccagattgtgaatcgcctggacatcatgctgccgggcaatcgccccttcgttgcccccagtgccgttattcaggcccgccagcgcctgggaagtgaggctgtccgccgcgtgttcacgaaaacagcgcagctctggcataacgccacgccgcatccgcactggtgcggcctgaccctgctggccatcgatggtgtgttctggcgcacaccggatacaccagagaacgatgcagccttcccccgccagacacatgccgggaacccggcgctctacccgcaggtcaaaatggtctgccagatggaactgaccagccatctgctgacggctgcagccttcggcacgatgaagaacagcgaaaatgagcttgctgagcaacttatagaacaaaccggcgataacactctgacgttaatggataaaggttattactcactgggactgttaaatgcctggagcctggcgggagaacaccgccactggatgatacctctcagaaagggagcgcaatatgaagagctcagaaaactgggtaaaggcgatcatctggtgaagctgaaaaccagcccgcaggcacgaaaaaagtggccgggactgggaaatgaagtgacagcccgcctgctgaccgtgacgcgcaaaggaaaagtctgccatctgctgacgtcgatgacggacgccatgcgcttccccggaggagaaatggcggatctgtacagtcatcgctgggaaatcgaactgggatacagggagataaaacagacgatgcaactgagcaggctgacgctgagaagtaaaaaaccggagcttgtggagcaagagctgtggggtgtcttactggcttataatctggtgagatatcagatgattaaaatggcggaacatctgaaaggttactggccgaatcaactgagtttctcagaatcatgcggaatggtgatgagaatgctgatgacattgcagggcgcttcaccgggacgtataccggagctgatgcgcgatcttgcaagtatgggacaacttgtgaaattaccgacaagaagggaaagggccttcccgagagtggtaaaggagaggccctggaaataccccacagccccgaaaaagagccagtaagttgcttaactgactggcattacggcacattgtcggcgttttttttcggaccttgtgagtcattttgattaatggtagcgtcgcttgtcaatgtaagttgttgatacataatatttatatatgattaatcaacggatgattcacatgaagaatactaaattactgctggcgattgcgacctctgcagcattactgacagggtgtcaaaatacccacggtattgataccaatatggctatcagctccggtttaaatgcctataaagcagcaacattaagcgatgccgatgcaaaagcgattgccaatcagggctgtgccgaaatggacagcggcaatcaagtcgcaagtaaatccagcaagtacggtaaacgtctggcaaaaatcgccaaagcattgggtaacaatattaatggcacgccggtcaactataaggtttatatgaccagcgacgtcaacgcatgggcgatggcgaacggctgtgttcgtgtctacagtggcctgatggacatgatgaatgacaacgaaattgaaggcgttctgggccatgaactgggccacgtcgcgttgggtcactcgctggctgaaatgaaagcttcttatgcgatcgttgccgcacgcgatgccatttcagctaccagcggtgtggcttcccagctttcccgctcacaattaggtgatatcgcagaaggcgctatcaatgctaaatactcccgtgataaagagtccgaagcagatgatttctcctttgatctgttgaagaaacgtggcatcagcacccaggggctggttggcagctttgaaaaactggctagcctggatggcggtcgcacccagtccatgtttgactctcacccaccatcaacagagcgtgcgcaacacatccgtgatcgtatcgcctctggtaagtaaatcattgtcatctttcgggctggtcttctgccagcccgctataattgcgcaataaatccccatctgaatacagacaaaactggtttttgcacacaacgttaacgatttgtggcgtcggcgcgtataatgcgcgcggttatgttaacggtacgcctgttttaaggagataaagatgacggcaattgccccggttattaccattgatggcccaagcggtgcagggaaaggcaccttgtgtaaggctatggcggaagcgttgcaatggcatcttctggactcgggtgcaatttatcgcgtactggcattggcggcattacatcaccatgttgatgttgcgtcggaagatgcgctggtaccgctggcatcccatctggatgtacgttttgtgtcgaccaatggcaatctggaagtgatcctcgaaggggaagatgtcagcggcgaaattcgtactcaggaagtggcgaatgcagcttcacaagtcgcggcattcccacgcgttcgtgaagcattattgcgtcgccaacgcgcgtttcgcgaattaccaggtctgattgccgatggccgcgacatgggaacggtggtattccctgatgcaccagtgaaaattttccttgacgcctcctcggaagaacgtgcgcatcgccgcatgctacagttgcaggagaagggctttagtgttaactttgagcgccttttggccgagatcaaagaacgcgacgaccgcgatcgtaaccgagcggtagcgccactggttccggcagccgatgctttagtgttggattccaccaccttaagcattgagcaagtgattgaaaaagcgctacaatacgcgcgccagaaattggctctcgcataagcgaccgaatttgcagtacccccgttgcaatggaatgacagcgggtatgttaaacaaccccatccggcatggagccaggtggacgttaaatataaacctgaagattaaacatgactgaatcttttgctcaactctttgaagagtccttaaaagaaatcgaaacccgcccgggttctatcgttcgtggcgttgttgttgctatcgacaaagacgtagtactggttgacgctggtctgaaatctgagtccgccatcccggctgagcagttcaaaaacgcccagggcgagctggaaatccaggtaggtgacgaagttgacgttgctctggacgcagtagaagacggcttcggtgaaactctgctgtcccgtgagaaagctaaacgtcacgaagcctggatcacgctggaaaaagcttacgaagatgctgaaactgttaccggtgttatcaacggcaaagttaagggcggcttcactgttgagctgaacggtattcgtgcgttcctgccaggttctctggtagacgttcgtccggtgcgtgacactctgcacctggaaggcaaagagcttgaatttaaagtaatcaagctggatcagaagcgcaacaacgttgttgtttctcgtcgtgccgttatcgaatccgaaaacagcgcagagcgcgatcagctgctggaaaacctgcaggaaggcatggaagttaaaggtatcgttaagaacctcactgactacggtgcattcgttgatctgggcggcgttgacggcctgctgcacatcactgacatggcctggaaacgcgttaagcatccgagcgaaatcgtcaacgtgggcgacgaaatcactgttaaagtgctgaagttcgaccgcgaacgtacccgtgtatccctgggcctgaaacagctgggcgaagatccgtgggtagctatcgctaaacgttatccggaaggtaccaaactgactggtcgcgtgaccaacctgaccgactacggctgcttcgttgaaatcgaagaaggcgttgaaggcctggtacacgtttccgaaatggattggaccaacaaaaacatccacccgtccaaagttgttaacgttggcgatgtagtggaagttatggttctggatatcgacgaagaacgtcgtcgtatctccctgggtctgaaacagtgcaaagctaacccgtggcagcagttcgcggaaacccacaacaagggcgaccgtgttgaaggtaaaatcaagtctatcactgacttcggtatcttcatcggcctggacggcggcatcgacggcttggttcacctgtctgacatctcctggaacgttgcaggcgaagaagcagttcgtgaatacaaaaaaggcgacgaaatcgctgcagttgttctgcaggttgacgcagaacgtgaacgtatctccctgggcgttaaacagctcgcagaagatccgttcaacaactgggttgctctgaacaagaaaggcgctatcgtaaccggtaaagtaactgcagttgacgctaaaggcgcaaccgtagaactggctgacggcgttgaaggttacctgcgtgcttctgaagcatcccgtgaccgcgttgaagacgctaccctggttctgagcgttggcgacgaagttgaagctaaattcaccggcgttgatcgtaaaaaccgcgcaatcagcctgtctgttcgtgcgaaagacgaagctgacgagaaagatgcaatcgcaactgttaacaaacaggaagatgcaaacttctccaacaacgcaatggctgaagctttcaaagcagctaaaggcgagtaattctctgactcttcgggatttttattccgaagtttgttgagtttacttgacagattgcaggtttcgtcctgtaatcaagcactaagggcggctacggccgcccttaatcaatgcagcaacagcagccgcttaatttgcctttaaggaaccggaggaatcatgaccaagtcagaattgatagaaagacttgccacccagcaatcgcacattcccgccaagacggttgaagatgcagtaaaagagatgctggagcatatggcctcgactcttgcgcaaggcgagcgtattgaaatccgcggtttcggcagtttctctttgcactaccgcgcaccacgtaccggacgtaatccgaagactggcgataaagtagaactggaaggaaaatacgttcctcactttaaacctggtaaagaactgcgcgatcgcgccaatatttacggttaagttttttactcaaacttgaacgagagaaaagcacctgtcgggtgcttttttcatttctctaatctggaactggaagctgcctcgcagagttttgaacagttttcaccctttcgttaaattcttctgaatatgcctcggggaacgcaaaattcccaccagacaaccgctcaacaaagttgcacactttccataaacagggaggggtgcatgaaaataacgacagtcggtgtatgcataattagcggaatttttccgttgctgattttgccccaattgcctgggacattaacccttgcgtttctgactctcttcgcctgcgtactggcatttatccctgttaaaaccgtccgttatatcgcgctgacgttgctgtttttcgtttggggcatattatcagcaaagcaaattttgtgggcaggagaaaccttaactggcgcgacgcaggatgcaattgttgagatcactgcaactgacggcatgaccactcattacggtcaaattactcatctacaaggtcgacgtatattccctgcgtcaggtctcgtgatgtatggcgaatatcttccgcaagcggtttgtgctggacaacaatggtcaatgaaactcaaagttcgtgcagttcatggccaacttaatgatggcggctttgatagccagcgttatgccattgcccagcatcagccgctcaccggccgttttctgcaggcaagtgtcattgaaccgaattgtagcctgcgtgcacagtatctggcgtcactacaaacaacgctgcaaccctatccgtggaatgcggttattcttggtttaggtatgggggaacggttatccgtccccaaagaaatcaaaaatatcatgcgcgatactggaacggcgcatttaatggcgatatcgggattgcacatcgcttttgcggcgttgctggctgccggactcattcgcagtggacaaatttttctgcctgggcgctggatccactggcaaataccattaattggcggaatctgctgtgctgctttttatgcctggttgacgggaatgcaacctcctgcattgcgtaccatggtggcgcttgctacgtggggaatgcttaagttaagtgggcgacagtggagtggctgggatgtatggatatgttgtctggcggcaattttgctgatggatcctgttgccattctctcgcaaagtttatggctctctgccgctgcggtcgcggcattgatattttggtatcagtggtttccctgtcctgagtggcaactgccgccggtattgcgtgcagttgtttccctcatccatctgcaactgggaatcacacttctgcttatgcccgtgcaaatcgtcatatttcatggcattagtctgacctcgtttattgcaaatctattagcaattcccttggtgacatttatcacggttccgttgatcctcgccgcgatggttgtgcatttaagcgggccgttaatcctggagcaagggttatggtttcttgccgaccggtctttggctttacttttctgggggttaaagagtttgccggaagggtggatcaacattgctgaatgttggcaatggctatcattttccccatggttcttactggtggtatggcgattaaacgcctggcgaacgttgccagcaatgtgtgtggctggaggcttgctgatgtgctggccgctgtggcaaaaacctcgacctgacgagtggcagctgtacatgcttgatgtcgggcaagggctggcaatggtgatagccagaaacggcaaagcgattctctatgacacaggactggcctggcctgaaggggatagtgggcaacaactgattatcccctggctccactggcataatcttgaaccggaaggcgttattctgagccatgaacatctggatcaccggggagggctggattcaatattgcatatatggccgatgttatggatcagaagtccgttaaactgggaacatcatcagccctgtgtgcgtggcgaagcgtggcaatggcaaggattgcgtttcagcgcgcactggcctttacaaggtagcaacgataaaggaaataaccattcctgtgtggttaaggttgatgacgggacgaatagcattcttctaaccggtgatattgaagccccagctgaacaaaagatgctaagccgttactggcagcaagtgcaggcaacattgcttcaggtacctcaccatggcagtaatacctcatcatcgttgccattaattcagcgagtgaatggaaaagtggcactcgcatcggcatcgcgctataacgcatggcgactgccctctaacaaagttaagcatcgctatcaactgcaaggatatcaatggattgatactccacatcaaggtcaaacaacggtcaatttttcagcgcaaggctggcggattagcagcctcagggagcaaattttacctcgttggtatcatcagtggtttggcgtgccagtggataacgggtagaatatgcggctatttcaacaaatgctggttttttgaatgcataacgacaaagatctctctacgtggcagacattccgccgactgtggccaaccattgcgcctttcaaagcgggtctgatcgtggcgggcgtagcgttaatcctcaacgcagccagcgataccttcatgttatcgctccttaagccacttcttgatgatggctttggtaaaacagatcgctccgtgctggtgtggatgccgctggtggtgatcgggctgatgattttacgtggtatcaccagctatgtctccagctactgtatctcctgggtatcaggaaaggtggtaatgaccatgcgtcgccgcctgtttggtcacatgatgggaatgccagtttcattctttgacaaacagtcaacgggtacgctgttgtcacgtattacctacgattccgaacaggttgcttcttcttcttccggcgcactgattactgttgtgcgtgaaggtgcgtcgatcatcggcctgttcatcatgatgttctattacagttggcaactgtcgatcattttgattgtgctggcaccgattgtttcgattgcgattcgcgttgtatcgaagcgttttcgcaacatcagtaaaaacatgcagaacaccatggggcaggtgaccaccagcgcagaacaaatgctgaagggccacaaagaagtattgattttcggtggtcaggaagtggaaacgaaacgctttgataaagtcagcaaccgaatgcgtcttcaggggatgaaaatggtttcagcctcttccatctctgatccgatcattcagctgatcgcctctttggcgctggcgtttgttctgtatgcggcgagcttcccaagtgtcatggatagcctgactgccggtacgattaccgttgttttctcttcaatgattgcactgatgcgtccgctgaaatcgctgaccaacgttaacgcccagttccagcgcggtatggcggcttgtcagacgctgtttaccattctggacagtgagcaggagaaagatgaaggtaagcgcgtgatcgagcgtgcgactggcgacgtggaattccgcaatgtcacctttacttatccgggacgtgacgtacctgcattgcgtaacatcaacctgaaaattccggcagggaagacggttgctctggttggacgctctggttcgggtaaatcaaccatcgccagcctgatcacgcgtttttacgatattgatgaaggcgaaatcctgatggatggtcacgatctgcgcgagtataccctggcgtcgttacgtaaccaggttgctctggtgtcgcagaatgtccatctgtttaacgatacggttgctaacaacattgcttacgcacggactgaacagtacagccgtgagcaaattgaagacgcggcgcgtatggcctacgccatggacttcatcaataagatggataacggtctcgatacagtgattggtgaaaacggcgtgctgctctctggcggtcagcgtcagcgtattgctatcgctcgagccttgttgcgtgatagcccgattctgattctggacgaagctacctcggctctggataccgaatccgaacgtgcgattcaggcggcactggatgagttgcagaaaaaccgtacctctctggtgattgcccaccgcttgtctaccattgaaaaggcagacgaaatcgtggtcgtcgaggatggtgtcattgtggaacgcggtacgcataacgatttgcttgagcaccgcggcgtttacgcgcaacttcacaaaatgcagtttggccaatgatcgaaaaaatctggtctggtgaatcccctttgtggcggctattgctgccactctcctggttgtatggcctggtgagtggcgcgatccgtctttgctataaactaaaactgaagcgcgcctggcgtgcccccgtaccggttgtcgtggttggtaatctcaccgcaggcggcaacggaaaaaccccggtcgttgtctggctggtggaacagttgcaacagcgcggtattcgcgtgggggtcgtatcgcggggatatggtggtaaggctgaatcttatccgctgttattgtcggcagataccacaacagcacaggcgggtgatgaacctgtgttgatttatcaacgcactgatgcgcctgttgcggtttctcccgttcgttctgatgcggtaaaagccattctggcgcaacaccctgatgtgcagatcatcgtaaccgacgacggtttacagcattaccgtctggcgcgtgatgtggaaattgtcgttattgatggtgtgcgtcgctttggcaatggctggtggttgccggcggggccaatgcgtgagcgagcggggcgcttaaagtcggttgatgcggtaatcgtcaacggcggtgtccctcgcagcggtgaaatccccatgcatctgctgccgggtcaggcggtgaatttacgtaccggtacgcgttgtgacgttgctcagcttgaacatgtagtggcgatggcggggattgggcatccgccgcgcttttttgccacgctgaagatgtgtggcgtacaaccggaaaaatgtgtaccgctggccgatcatcagtctttgaaccatgcggatgtcagtgcgttggtaagcgccgggcaaacgctggtaatgactgaaaaagatgcggtgaaatgccgggcctttgcagaagaaaattggtggtatttgcctgtagacgcacagctttcaggtgatgaaccagcgaaactgcttacgcaactaaccttgctggcttctggcaactagttacgccgcggcagcgttcgattgatggagtcatgaatgtcgctgccgcacctctcccttgctgatgcgcgtaatcttcaccttgccgcacaaggcctgttaaacaaaccccgccgtcgagcgtcgttggaggatattccggcaacgatctcccgcatgtccttgctgcaaatcgataccatcaatattgttgcccgtagtccatatctggtgcttttcagtcgtctgggaaattatcctgcccagtggctggatgagtctctggcgcgtggcgaattaatggaatactgggcgcatgaagcctgctttatgccgcgtagcgactttcgtcttattcgccaccgcatgctggcacctgaaaaaatgggctggaaatacaaagacgcctggatgcaggaacatgaggcggaaattgcacagttaattcagcatattcatgataaggggccggtacgttcagccgattttgagcatcctcgtaaaggtgcaagcggctggtgggaatggaagccgcataaacggcatctggaaggtttatttactgccggaaaggtgatggtgattgaacggcgcaacttccagcgcgtttatgatttaacccaccgtgtcatgcctgactgggatgatgagcgcgatctcgtttcgcaaacagaagcagaaatcatcatgctggataacagtgcgcgtagcctgggaatattccgcgaacagtggctggcagattactatcggctgaaacgtccggcactggcggcgtggcgcgaagcgagggctgaacagcagcaaatcattgctgtgcatgttgaaaaattgggcaatctttggctgcatgatgatttgctgccgctactcgagcgagcgctggccggaaagctcactgcaacgcacagcgcggtactttcgccttttgatcctgttgtctgggatcgcaaacgcgcagagcagctttttgattttagctaccggctggagtgctataccccagcgccgaaacgccagtatggctattttgttctgccgttattacatcgtgggcaattagttgggcgaatggatgccaaaatgcatcgccagacaggcatccttgaagttatctctctgtggttacaggaaggtattaaaccaacgacaacgctgcaaaaagggctacgtcaggcgattactgatttcgctaactggcagcaggcaacgcgggtgacattaggatgctgcccgcaaggcctctttactgattgccgcaccggctgggaaatagaccccgtcgcataaatgattatgataagatttatgcattcataacccgatccatctggaggaactatggatcatcgtctgcttgaaatcattgcctgcccggtttgcaacggaaaactttggtataaccaggaaaaacaagagcttatttgcaaactggacaacctcgctttcccgctgcgtgatggcattccagtgttgctggaaacggaagcgcgcgtgctgactgctgatgagagtaaatcatgagttttgtggtcattattcccgcgcgctacgcgtccacgcgtctgcccggtaaaccattggttgatattaacggcaaacccatgattgttcatgttcttgaacgcgcgcgtgaatcaggtgccgagcgcatcatcgtggcaaccgatcatgaggatgttgcccgcgccgttgaagccgctggcggtgaagtatgtatgacgcgcgccgatcatcagtcaggaacagaacgtctggcggaagttgtcgaaaaatgcgcattcagcgacgacacggtgatcgttaatgtgcagggtgatgaaccgatgatccctgcgacaatcattcgtcaggttgctgataacctcgctcagcgtcaggtgggtatggcgactctggcggtgccaatccacaatgcggaagaagcgtttaacccgaatgcggtgaaagtggttctcgacgctgaagggtatgcactgtacttctctcgcgccaccattccttgggatcgtgatcgttttgcagaaggccttgaaaccgttggcgataacttcctgcgtcatcttggtatttatggctaccgtgcaggctttatccgtcgttacgtcaactggcagccaagtccgttagaacacatcgaaatgttagagcagcttcgtgttctgtggtacggcgaaaaaatccatgttgctgttgctcaggaagttcctggcacaggtgtggatacccctgaagatcttgagcgcgttcgcgctgaaatgcgctaatttcacttcacgacacttcagccaattttgggaggagtgtcgtaccgttacgattttcctcaatttttcttttcaacaattgatctcattcaggtgacatcttttatattggcgctcattatgaaagcagtagcttttatgagggtaatctgaatggaacagctgcgtgccgaattaagccatttactgggcgaaaaactcagtcgtattgagtgcgtcaatgaaaaagcggatacggcgttgtgggctttgtatgacagccagggaaacccaatgccgttaatggcaagaagctttagtacgcccggaaaagcccgacaactggcatggaaaaccaccatgctggcaagaagtgggactgtccgtatgccgactatttatggtgtgatgacgcatgaagaacaccccggccccgatgtcctgctactggagcggatgcgtggtgtttcggtggaggcaccagcccgaacaccagaacgctgggaacaactcaaagaccaaatcgttgaagccttactggcctggcaccgtcaggacagtcgcggttgcgtcggcgcggtcgacaatactcaggaaaatttctggccctcatggtaccggcaacatgttgaagtgctatggaccacgctcaatcagttcaataacaccggtctgacgatgcaggataagcggatcctgtttcgcactcgcgaatgtctcccggcattatttgaaggctttaacgacaattgtgtgctgattcacggtaacttctgtttacgcagcatgttgaaagattcgcgcagcgatcagttactggcgatggtcgggccgggactaatgctttgggcaccgcgagaatacgaactgttccgactaatggataattctctggcggaagatttgctctggagttacctgcaacgcgcgccagtggcggagtcgttcatctggcggcgttggttgtatgtgttatgggatgaagttgcgcaactggttaataccggacgatttagtcggcgcaacttcgatctggcatcaaaatcactcttgccgtggctcgcctgacgaaccttttagccactgccagatacggccaagcgtttcatagccaacacgatcgctatgcatcaaccagaccggagaagggattgcccgttcccacgggttaagcggcgagtcgatggccaactgattcgccggggctggtagcggatttaacccttcctgctgaaaaaagatcatcgcccgcggcagatgtgatgcggaggtcaccagcaggaaaggggcgtcaccaatcgcctgtttcactgctgcagcttcttcttcggtatcttttggcaaatccagggtgataatttgctcgcgcggcacgcccagcgattgcgcaactctggcacctacttccgctgtactcaccgtattggtttttgctacgcctcccgtgaagatcagttttgatcccggattttcgcgccataagcgaataccttcattcaggcgtggcagactgttattgattaaattagagctcggtgcccactgcgggttccaggtataaccacctccgagcaccacgatatagtccactttttgcgaattattccatgtcggataggtgctttcgatgggacgcagcaggcggtcggctaccggttgcaaactcaataacaagagcgccagccacccaatgctaataaaaatcttcccggttttttgaaaacggctaaaccacagcagcgccaggccagcgccaataatcaacaacatcagcggaagtggcagcaacatattgccaatcacttttttcagtgtaaaaagcatcctttctggttccttttttaaccatatagcaagggatcgccagcgatattacaccagacgggttcattctcgccgtggctgtgacaaaatagcgtctttatcagaaaacgtcttagccaaccggtggagaaagcaatgcaggatcgcaattttgatgatattgcggaaaagttttcccgtaacatttacggcaccaccaaagggcagcttcgacaggctattctgtggcaggatctcgatcgcgtgctggcggaaatgggcccgcaaaaactgcgtgtgctggatgctggcggtggagaagggcagaccgcaatcaaaatggccgagcgtgggcatcaggtcattttatgcgatctttctgcgcagatgatcgaccgcgcaaaacaggcggcagaagcaaaaggtgtgagcgacaacatgcaatttatacattgcgccgctcaggatgttgcttcgcatttggaaacgcccgttgatctgatattgttccatgcggtgctcgagtgggtggctgatccccgcagcgtattgcagaccctgtggtcagtgttgcgtccaggcggcgtgttgtcgttaatgttctacaatgcgcatggtttgttgatgcataacatggtcgccgggaattttgattacgtgcaggcgggaatgccgaaaaagaaaaaacggacgctttcgccagattatccacgcgacccggcgcaggtttatctgtggctggaagaagctggttggcaaattatgggtaagacaggcgttcgcgtgtttcatgattatctgcgcgagaaacaccagcagcgcgactgctatgaagcattacttgaattagaaacgcgttattgccgtcaggaaccgtatattaccctggggcgttatattcatgtcaccgcgcgcaaaccgcagagcaaggataaagtatgagtgaattttcccagacagtccccgaactggttgcctgggccagaaaaaatgacttctccatctcgctgccggtagaccgactctcttttctgctggcggttgccacgctgaacggcgagcgtctggatggtgagatgagtgaaggcgagctggtggatgcattccgccatgtgagtgatgcgtttgagcaaaccagcgaaaccatcggcgtgcgcgccaataacgcgatcaacgacatggtgcgtcaacgtctgctgaaccgctttaccagcgagcaggcggaagggaacgcaatttaccgtctgacgccgctcggcatcggcattactgactactacatccgtcagcgcgagttttctacgctgcgtctttctatgcagttgtcgattgtggcgggtgagctcaaacgcgcagcagatgccgccgaagagggcggtgatgaatttcactggcaccgtaatgtctatgcgccactgaaatattcggtagcagaaattttcgacagtatcgacctgacgcaacgtctgatggacgaacagcagcagcaggtgaaggacgatatcgcccagttgctgaacaaagactggcgggcggcgatttccagctgtgaattgttgctttcggaaacttccggaacgctgcgtgaattgcaggatacgctggaagcggcaggcgacaaattgcaggctaatctgttgcgcattcaggatgcgacgatgacccatgacgatctgcatttcgtcgatcgtctggtgttcgatctgcagagcaaactcgatcgtattatcagttggggccagcaatccatcgacttgtggattggctacgaccgccacgtacacaaatttattcgtaccgcgatcgatatggataaaaaccgcgtctttgctcagcggttacgtcagtcggtacaaacctattttgatgagccgtgggcgctaacttatgccaatgccgatcgtctgctggatatgcgtgacgaagagatggcactgcgcgatgaagaagtgactggggaacttcctgaggatctggaatacgaagagtttaacgagatccgcgaacagctggcggcgatcatcgaagaacaacttgccgtgtacaaaaccagacaagtgccgctggatcttggtctggtggtacgcgaatatctgtcacagtatccgcgtgcacgtcactttgacgttgcgcgtattgttattgatcaggcggtacgtcttggcgtagcgcaagcagatttcaccggactgccagcgaaatggcagccgattaatgattacggagccaaggtacaggcgcatgtcatcgacaaatattgaacaagtgatgccggttaagctggcgcaggcgctggcgaatccgttatttccggcgctggacagcgccttacgttcaggacgccatattggcctcgacgaactggataatcatgcattcctgatggattttcaggaatatctggaagagttttacgcgcgttataacgttgagcttattcgcgcaccagaagggttcttctatttacgcccacgttccaccacgctgatccctcgttccgtcttgtcggaactggatatgatggtcgggaaaatcctctgttatctctatctcagcccggaacggctggcgaatgaggggattttcacccagcaggaactgtacgacgaactgctcaccctggccgatgaagcaaaactgctgaaactggtgaacaaccgttcaaccggttcagacgttgaccgtcagaagttgcaggagaaagtacgttcttcgctcaaccgtctgcgtcgtttaggcatggtgtggtttatgggccacgacagcagcaagtttcgcattaccgaatcggtgttccgcttcggagccgatgtgcgtgctggcgacgatccccgtgaagcacagcgtcgcctgattcgtgatggcgaagcaatgccgattgaaaatcatctgcaactcaacgatgaaaccgaagagaatcagccagatagcggagaggaagaataatgattgaacgcggtaaatttcgctcactgacgctgattaactggaacggcttttttgcccgaacttttgaccttgacgagctggtcacgacgctttctggcggtaacggggcgggtaaatccaccaccatggcggcgttcgttacggcgctgatccccgacctgaccctgctgcatttccgtaacactacggaagccggggccaccagcggttcgcgcgataaaggtctgcacggtaagctgaaagcgggtgtctgttattcgatgctcgacaccattaactcgcgccaccagcgcgtggtggtcggtgtgcgtctgcaacaggttgccggacgcgatcgtaaagtggatatcaagccgtttgccattcagggactgccgatgtcggtgcagccgacacagctggtgaccgaaaccctgaacgaacgccaggcgcgcgtgctgccgcttaacgagctgaaagacaagctcgaggcgatggaaggcgtgcagtttaaacagttcaactccattactgattaccactcgctgatgttcgatctgggcatcatcgcgcgtcgtctgcgctccgcatctgaccgtagcaaattctatcgtctgatcgaagcttcgctgtatggtgggatctccagtgccattacccgttctctgcgcgactacctgttgccagaaaacagcggcgtgcgtaaagcgttccaggacatggaagcggcgctgcgtgaaaaccgtatgacgctggaagcgattcgtgtcacccagtcggaccgcgacctgtttaagcatctgatcagcgaagccaccaactacgtggcggcggactacatgcgtcacgccaacgagcgccgtgtccatctcgacaaagccctggagtttcgtcgcgagctacatacttcgcgtcagcaactggcggctgagcagtacaaacacgtcgatatggcgcgtgagctggcagagcacaacggtgccgaaggcgatctggaagcggattatcaggcggccagtgatcacctgaacctggtgcaaaccgcactgcgtcagcaggagaagatcgaacgctacgaagcggatctcgatgagctgcagatccgtctggaagagcaaaatgaagtggtggcagaagccatcgaacgccaggaagagaatgaggctcgtgcggaagctgccgaactggaagtggacgagctgaaaagccagcttgctgactaccagcaggcgctggacgtccagcaaacgcgcgcgatccagtataaccaggcgattgctgcgcttaatcgtgccaaagaactgtgccatctgccggacttaaccgccgactgcgccgccgaatggctggaaaccttccaggcgaaagagctggaagcgactgaaaaaatgctctctcttgagcagaaaatgagcatggcgcaaaccgcgcacagccagtttgagcaggcttatcagctggtggtggcaatcaacggcccactggcgcgtaacgaggcgtgggatgtcgctcgcgaactattgcgcgaaggggtcgatcagcgtcacctggcagagcaggttcagccgctgcggatgcgattaagcgaactggaacagcgtctacgcgagcagcaagaagctgagcgtctgctggcagatttctgcaaacgtcagggcaagaattttgatatcgacgaactggaagccctgcatcaggaactggaagcacgcattgcctctctttccgatagcgtgtctaacgcccgtgaagagcgcatggcactgcgccaggagcaggaacagctgcagtctcgcattcagagtttgatgcagcgtgcgccggtttggctggcagcgcaaaacagtctcaaccagttgagcgaacagtgcggcgaagagtttacctccagccaggacgtcaccgaatatctgcaacagttgctggagcgtgagcgagaggcgattgttgaacgcgatgaagtgggcgcgcgcaaaaacgccgtcgatgaagagatcgaacgtttaagccagcctggcggctctgaagatcagcgtctgaacgcgctggcggagcgttttggtggtgtgctgctgtcagaaatttatgacgacgttagcctggaagatgcgccgtacttctcagcgctgtatggcccgtcacgccacgccatcgtggtgccagatctgtcacaggtaactgaacacctggaaggcttgaccgattgcccggaagatctctatctgatcgaaggagatccgcagtcattcgatgacagcgtgttcagcgttgatgagctggaaaaagcggtagtggtgaaaatcgccgatcgtcagtggcgttattcacgtttcccggaagtgccgctgtttggtcgtgctgcgcgtgaaagccgtattgaaagcctccatgccgagcgtgaagtgctttccgaacgcttcgccacgctctcctttgatgtacagaaaactcagcgtctgcatcaggcgttcagccgctttatcggcagtcatctggcggttgcgtttgagtctgacccggaagcagaaatccgtcaactgaacagccgtcgcgtcgaactggagcgggcgttaagtaatcatgaaaatgataaccagcagcagcgtattcagtttgagcaggcgaaagagggcgttacggcgctgaaccgcattctgccgcgtctcaacctgttggctgatgacagcctggcggatcgcgtcgatgaaatccgcgaacgtctggatgaagcccaggaagccgcgcgttttgttcagcagtttggcaatcaactggcgaaactggaaccgattgtttcggtattgcagagcgacccggaacagttcgaacagttaaaagaagattacgcgtactctcagcagatgcagcgcgatgcccgtcagcaggcgtttgccctgacggaagtggtgcagcgtcgtgcgcactttagctattctgactcggcagaaatgcttagcggtaacagcgatctcaacgaaaaactgcgtgaacgtctggaacaggcggaagcggagcgtacccgcgctcgcgaagcgttgcgcggtcacgcagcgcagttgagtcagtacaaccaggtgctggcttcgctgaaaagttcttacgacaccaaaaaagagctactcaacgatctgcaacgtgaattgcaggatatcggcgtgcgtgctgatagcggggcagaagagcgggcgcgtattcgccgtgacgagctgcatgcgcaactgagcaataaccgttcacgccgcaatcaactggaaaaagcgcttaccttctgcgaagcggagatggacaacctgacccgcaaactgcgcaagctggagcgggattactttgagatgcgcgagcaggtagtgaccgccaaagcgggctggtgtgcggtgatgcgcatggtgaaagataacggcgttgagcgccgcttacaccgtcgtgagctggcttatctctccgctgatgatttgcgttccatgtcggataaggcgttaggtgcgctgcgtctggcggtggcggataacgaacatctgcgcgacgtgctgcgcatgtcggaagatccgaaacgtccggagcgtaaaattcagttcttcgtggcggtttatcagcatctgcgtgaacgtattcgtcaggatattattcgtaccgatgatccggtggaagctatcgaacagatggagattgaacttagccgtctgaccgaagaattaacctcccgtgaacagaaactggcgatcagttcccgcagcgtggcgaacatcattcgcaaaaccattcagcgcgagcagaaccgtatccgtatgctcaaccaggggttgcagaacgtatcgtttggtcaggtgaacagcgtgcgtctcaacgtgaacgtgcgtgaaacgcacgccatgctactggatgtgctctctgaacagcacgagcagcatcaggatctgtttaacagcaaccgtttgaccttctcggaagcgttggcgaaactgtatcaacgtcttaacccgcagattgatatggggcagcgcacgccgcagaccatcggtgaagaactgctggattaccgcaactatctggaaatggaagttgaggttaaccgtggttccgatggctggctgcgcgcagagtctggtgcattgtcgaccggtgaggcgattggtaccggtatgtcgattctggtgatggtggtacaaagctgggaagatgaatctcgccgcctgcgcggtaaagatatctctccttgccgcctgctgttcctcgatgaagcagcgcgactggatgctcgttctatcgccacgctgtttgaattgtgtgagcgtttgcaaatgcaactcatcatcgcagcgccggaaaatatcagcccggagaaaggcaccacctataaactggtgcgtaaagtcttccagaataccgaacacgttcatgtcgtcggcctgcgaggatttgcgccgcaactccctgaaacgcttccaggaactgacgaagcgccttctcaggcgagttaaaattaaggcggcagcaatgccgccttttctttttccgaaaactccgtttctgcactaaaaaagtggcacattacggcgcgcttttctttaaacttctttacattaggttatgtaaaaacgtatcggcgtttatatactgaagataagcctgatgagtaacaggcttgctcgtcatactttcgtgagtattggcgttgtacaggcaagtcgtaaaataacagcctggctattcagagtatgataaaaacagggggcaagggatgttgcttaatatgatgtgtggtcgtcggctgtcggcaatcagtttgtgcctggccgtaacattcgctccactgttcaatgcgcaggccgatgagcctgaagtaatccctggcgacagcccggtggctgtcagtgaacagggcgaggcactgccgcaggcgcaagccacggcaataatggcggggatccagccattgcctgaaggtgcggcagaaaaagcccgcacgcaaatcgaatctcaattacccgcaggttacaagccggtttatcttaaccagcttcaactgttgtatgccgcacgcgatatgcaacccatgtgggaaaaccgtgatgctgttaaagccttccagcaacagctggcagaggtggcgattgccggtttccagccgcagtttaataaatgggtagagttactgaccgatcctggtgttaacgggatggcacgcgacgtggtgctctctgatgcgatgatgggctatctccatttcattgcaaatattccggtcaaaggcactcgctggctatatagcagtaaaccttatgcacttgcaacgccgccgctctcggtgattaaccaatggcagctggcgctggataaaggtcaattgcctacgtttgttgcaggactggcaccgcagcatccgcaatatgcggcgatgcatgaatcgttactggccttactctgtgacaccaaaccgtggccccaactgaccggcaaagcaacgttgcgcccagggcagtggagtaacgacgtaccggcgttgcgcgaaatattgcaacgcacaggcatgttggacggggggccgaaaattactctacctggcgatgacacgccaactgacgcggtagtcagcccatccgctgttactgttgaaacagcagaaactaagccgatggataagcaaacgacgtctcgtagtaaacctgcgcctgccgttcgcgccgcctacgataatgaactggtggaagccgttaaacgttttcaggcatggcaaggattgggggcagatggtgctattggcccggcaacacgtgactggttaaacgtaacgcccgcccagcgtgctggcgtgttggctctcaacatccagcgattgcgcttgctgccaacagagctttctaccgggatcatggttaacattccggcctattcgctggtctactatcagaacggcaatcaggtgctggattcgcgagtcattgtcggtcgccccgatcgcaaaacgccgatgatgagcagtgcccttaacaacgtagtggtaaacccgccgtggaacgtacctccaactctggcacgcaaagatattctgccaaaagtgcgcaacgatccgggatatctcgaaagccatggctatacggtgatgcgcggctggaacagcagagaagcgattgacccatggcaggttgactggtctacaatcacggcctcgaatttaccgttccgcttccagcaggctccaggcccacggaactcgctggggcgctataaattcaatatgccgagttcagaggccatttatttgcatgacacgccgaaccacaatctgttcaagcgtgatacacgcgcattgagctcaggctgtgtacgagtgaataaagcttccgatctggcgaatatgctgttgcaggatgcaggctggaatgacaaacgtatttctgatgcgctgaagcagggtgatacacgttacgtcaatattcggcagtcgattccggtgaatctctactacctgacggcctttgttggtgcagatggtcgtacccagtatcgtacagatatttacaattatgatctgcctgcgcgatccagctcgcaaatcgtatcgaaagcggaacaattaatcaggtaaatgaagtagttcggggaaatcagttgtcgtaataattagcatgattgggggcgattctctgcagcccccgtcactgctggggttgagtcatcttgacgtctgctttacgggcggttaaggtgcctcttgtgcgccagaagtgcatataaacgataacattgacctgtagacttgattatcatggacaaattcgacgctaatcgccgcaaattgctggcgcttggtggcgttgcactcggtgccgccatcctgccgacccctgcgtttgcaacactctctaccccacgcccgcgcattttgacactcaataatcttcataccggagagtcaatcaaagcggagtttttcgatggcagaggctatattcaggaagaattggcaaaacttaaccattttttccgcgattaccgcgcgaacaaaataaagtccatcgacccaggattattcgaccagttgtatcgcctgcaagggttgttaggcacgcgcaaaccggtgcaactcatttccggttatcgttctattgataccaacaatgaactacgcgcccgcagccgtggagtagcgaagaaaagctatcacactaaaggccaggcgatggatttccatattgaaggtatcgcgttaagcaatattcgcaaagccgcgttatctatgcgcgcaggtggtgtaggatattatccacgtagtaactttgtgcatattgataccgggccagcacggcactggtagtaattgcttaacgaaacaggggcagtatgaactatcgtattattccggtcaccgcattctcccagaactgttcattaatctggtgtgaacaaacccgtctggccgcactggtcgatcctggcggcgatgcggaaaaaatcaaacaggaagttgatgacagcggcctgacactgatgcagatcctgctgacgcatggtcatctggaccacgttggcgcagcggcggaactggcgcaacattacggcgtgccggttttcggcccggaaaaagaagatgagttctggctgcaaggcttgcctgcgcaaagtcgtatgtttggtctggaagagtgccagccgctgacgccagatcgttggctgaacgaaggcgataccatcagcatagggaatgtgactttacaggtgttacattgccctgggcatacgccgggtcatgtcgtgttttttgatgatcgggcaaagctgctgatttctggcgatgttattttcaaaggcggagtagggcgcagtgacttcccgcgtggcgatcataatcaactgatttcttcaatcaaagataaattgctgccactgggggatgacgtgatatttattccgggtcacggaccattatccacacttggttatgaacgcctgcataatcccttcctgcaagacgaaatgcccgtctggtaaggcacataaaaaagcccgcttttaatgcgggcctggatttctggcaaagtgcgctttgtttatgccggatgcggcacgagcgccttatccggcctacaaaatcgtgcaaattcaaaatattgcaggggacgcgtaggcctgataagcgtagcgcatcaggcaatgttgcgtttgtcatcagtctcagcccgcttttcagcgggcttcattgtttttaatgcttacagcactgccacaatcgcttcgcacagcggagccatgttatctggtgtcatcccggccacatttacgcgaccagaagcaaccgcatatacgccaaactcttcgcgcagacgcagcacttgttcttttgtcaggccactgaaggagaacatgccgttctgtttgatgataaagctgaagtcgcggtttgcgcctttttcctgcagcgtattgacgaacaactgacgcatacgctgaatacgctggcgcatatcagtcagctcttgttcccaaatcgcacgtaacgcatcgttgctcaggatggtggcaacaacagaagcgccgtgtgctggtgggttagagtagttagcgcgaatcgccgctttcatttggctgaatgcgcgatcaacggtttcactgtcggcagcaaccagagtacaagcgccaacacgctcgttgtacaggccaaagtttttagagtaggaactggcaacaatcagctctttatgcatagccgcgaaagcgcgcagtccttcagcatcttcttccagaccacgggcaaaaccctggtaagcgaagtcaaacagcggtaaccagcctttctcaacggagagttgtgccagtgtttgccattgttccagcgtagggtcgataccggttgggttatggcagcagccatggaacagcactacgtcgccagcctgagcttcattcaggctgttaatcagtgcatcgaagtcaagagtgtgattttccgcatcataataagcgtattcacgaacttccagacctgcagagttaaagacgctcttatggttcggccagcttgggttgctcacccacacacgcttaacgctggtattttttgccaggaaatcggcagccacgcgtagtgcgccagtgccccccggagtctgtgccgtgcgagcacgtttgtcattgatcagggcgctacctttaccaaacagcagttcctgagtgcagcgaccaaattcagggatgccgtcaatgccgaggtaatttttggtggtttcattttcgagcagatactgttcagcctttttcacgctggtcagtaccggggttttgcccgtctcatctttatagacaccaatcccgaggttaattttgccgggacgttcatcggcacgaaacagatcggccaggcccagaatcgggtcggcaggagcggcggtaatgttctcaaacatgacgaggttccattatggttacagaagggaagtccgctatcagggtaacgggagatttacaaaattccaactattactgatgaaaacgcaggctgtttttgcaagacgtgagattgctctggaaggtataaaaaaaacaggaccaaagtcctgttttttcggcatttaacaaagaggtgtgctattagaactggtaaacgatacccacagcaacggtgtcgtctgaacctacgcccagtttgttgtcagaatcgatctggttgatgatgtagtcaacataggtggacatgtttttgttgaagtagtaggttgcgcccacttcaaagtagttcaccagatcaacatcaccgataccttctacgtctttcgctttagatttggtgtaagcgatggacggacgcagaccgaaatcgaactggtattgcgcaactaacagaacgtcttgcgttttgttggcgaagccgctggtgtttgtaaatttattagtgatcggcgtagcgttacgggtttcaccgtagttcgctgccaggtagatgttgttcgcgtcgtacttcagaccagtagcccactgttcagcttttttaccgttgccaagaggttgagcttcttgcaggttggtacggtcagctgcaccataagcaccaacgataccaaagccttcgtattcgtagctgatagaaccgccaacaccgtcgccgttagaacggcgtgcagtgtcacgctcgtttttacccaggtactgaacagcgaagttcaggccatcaaccagaccaaagaagttggagttacgataggtagcaacgccgccaacacgaccaacgaagaagtcatcgctgtatgcagtatcaccaccaaattctggcagcatatcggtgtaacccagtgcatcataaaccacaccgtagttacggccgtaatcgaaagaaccaacgtcagcgtatttaagacccgcgaatgccagacgcgttttgttaccagtttgagcgtcagcgccttcagagttgttaccctggaagttatattcccactgaccataaccggtcagatcggaattgatttgagtttcccctttaaaaccaagacgggcataggtcatgtcgccattgccaccgtaactgttttcaccgttacccttggaaaaataatgcagaccaacagctttaccgtacagatctactttgttgccatctttgttatagatttctgcagcgtttgcagtacctgctactaacagagcagggacgatcactgccagaatattgcgcttcatcattatttattaccctcatggtttttttatgacacctgccactgccgtcaataagttctgtcaataaaaatttacggaactattgatgagagtttggtgtctttatgtgtctgcaggcatctttccattcaaactaacgtttcgctaccgtgaaagtgctacaaagataaagatttggtttcaaaaagaaaaaatatgtaaccaaaagtaaaatttaaggaactttgtgaacaccgtcatatttccatagagacgtgatgatatttacagcaattttaatctatttatatgatttccttatatttaaattaactaaacggaaattttgtttctgatggaaactttatcgacctggcacaaaatcttctttcagacatccagaatgccaaaaaatagtatgaaaattgtgctattagctaagaaaaaactaatccgcaataagaatgcggattagtttttgcgcgtaaatgttgcaatgtaatattccgtaacaggatgatcgttatggcgggtttgcaaatagattgcttgacttaacaaacagataacttgacagaaaagataaaaaaagagccagcgggcgctggctcttgaagacgctaaattagaagctggcgttacgcggagtacgtgggaacggaatcacatcacgtacgttttgcacgccagttacgtaagcaatcagacgttcaaaaccaagaccgaaacctgaatgcggaacagtaccgtagcgacgcagatcgcgataccaccagtaatcttctttattcaggcccatttccagcatacgctcgtccagcacgtccagacgttcttcacgctgggagccaccaatgatctcaccgatgcccggagccagaacgtccatagccgcaacggttttaccgtcttcgttaaggcgcatatagaacgctttaatatctttcggatagtttttaaccactaccggtgctttaaagtgttcttccgccagataacgctcatgctcagaagagagatcgactccccagtaaaccgggttttcaaacttcctgccgcagttttcgagaatggtcactgcgtcggtataatccacctgcgcaaaatcggcttcaatgaagcgttccagacgtgaaacggcatctttatctacgcgttcagcgaagaatttcatgtcgtcagcgcgttcttcgagaaccgctttgaagacatatttcagcatggcttcagccagacccgcaatatcgttcaggttagcaaacgccacttccggctccagcatccagaattccgccaggtgacggctggtgttggagttttcagcacggaaagtcgggccgaaggtataaattttggacaatgcgcaagcgtaggtttcgccgttcaactggccagatacggtcaggaaagactctttaccaaagaagtctttgtcgaaatccactttgccctgatcgttacgcggcaggttttccagatccagcgtagaaacgcggaacatttcgcctgcaccttcggtatcagatgcggtaatcagtggcgttgaaacccagaagaatccctgctcgttaaagaagcgatgcagcgcctgcgccagcgtatggcgaacgcgcgcgacggcaccaatcaggtttgtgcgcggacgcaggtgagcgacttcacgcagatactcaatgctgtggcgttttgccgccatcgggtaagtgtctggatcttcaacccaaccagcaacttcaaccttgctggcctgaatttcaaattgttgcccctggcccggcgacgccacgactttacccgtcacaatgaccgagcagccggtggtcagacgcaggacgtcttcattgtaattgggcagagaattattgatgacagcctgtacaggatcaaagcaggaaccgtcataaacggcgaggaaggagatgccagcttttgaatctcggcgggtacgtacccatccgcgcacggtgacttcgctgtcaacggctacacggccctggagtacgtcggctacaggcacaacgctcataatattctctctgttaatagtcggaaaaaataaacacttgtccacccgtaaatggggggatacctatgttacctggcatctgcaatcagacaagcagaattcgcaaatgcagcgaaagatttcggaattaaaggtaaaaaaagggagccgattagctccctgatgatattaactggcttttttaatatgcggaaggtcgaacgctttgcgcagcgcccgaacaaacgctttatcatggcagatagttttgccagggctgtcagaaagtttcgccaccggtttaccgttacactctaccaacttaatgacaatattcaggggttttacctgggggatatcgcaggtcaggcgagtcccaataccaaaacttaattgcacgcgggaagagaagtggcggtatagctcaaccgctttgcgtaaatccagattgtcagagaaaaccagcgttttactctgtggatcaattcccagcttttcataatgtgcaatggctttttcaccccattcaaccgggtcgccagagtcatgacgcaggccctgataccgactagcgaactcgacaccgaaatcacgcaggaaagcatccatagtgatgcagtcggttaatgcaatgccaagttggtcgggatactcttccagccaggcagcaagtgcagctcgctggctgttggctagatccgggctgatttgctgatgtgcctggaaccattcgtgtgcctgtgttcccatcggcgtgagggaaagccgacgcgccagatcgtagttgctggtgcccacaaaccaggattcctgttgcagacgcttaacgatggtttcttgtacttcgcgagaaaaacggcgacgggtgccaaaatccatcagatggaagcgcgacatatcaagaccggcggttaacgccgagaagtcgactaatttgctttccagcgtgtcgagggcttgcgcaacgtcggcctgcggtgagcgatagcgatgtaccatttcactgataaccgccagcaaaggaacttcccagaggatgacttcacgccacgggccgcttaaacgaatatccagcttgccattatcgttggacacggtgacttgttccgggttaaagcggaactcgcgtaaccagttaagatagtcggccttaaagaaaggcagggcagaaagccactgatattcatcatcctgcaggcgcaggtgctgcatcgcctgaacctgttcacgaatagcatcggcataaatacccagcagatcgtcacctcggcaacgaaactccgccgcgacatgcacatcgtaatagtgatgaaacacggcttgctgcatatgcaacttataagcatctgtatccagcaacgagtgcagaacaggagaagcgaattgtgtcataggtgcgcagtagcgtcctcgtacaggagcgtttagtacaataaacatcttcaggaactgctggagtataccttgtttcgcaatttattgaaccccgatcacaccatatgccacctttctggtcgatggcattacgcggtgtatgttataaaaatgtagcaataaaggcgtttgtacctgaaaagatgaagattctgcatagcgcgatttacgcaacaggaatagactgaacaccagactctataaaagatgctaaaggttatttatgactcaacagccacaagccaaataccgtcacgattatcgtgcgccggattaccagattactgatattgacttgacctttgacctcgacgcgcaaaagacggtcgttaccgcggtcagccaggctgtccgtcatggtgcatcagatgctccccttcgtctcaacggcgaagacctcaaactggtttctgttcatattaatgatgagccgtggaccgcctggaaagaagaagagggcgcactggttatcagtaatttgccggagcgttttacgcttaagatcattaatgaaataagcccggcggcgaataccgcgctggaagggctttatcagtcaggcgatgcgctttgcacccagtgtgaagccgaaggtttccgccatattacgtattatctcgaccgcccggacgtgctggcgcgttttaccaccaaaattattgccgataaaatcaaatatcccttcctgctttccaatggtaaccgcgttgcgcaaggcgaactggaaaacggacgccattgggtacagtggcaggacccgttcccgaaaccgtgctacctgtttgcgctggtggcaggcgactttgatgtactgcgcgatacctttaccacgcgttctggtcgcgaagtagcactggagctgtacgtcgatcgcggcaaccttgatcgcgcgccgtgggcgatgacctcgctgaaaaactccatgaaatgggatgaagaacgctttggcctggagtatgacctcgacatctatatgatcgtcgcggtggatttcttcaatatgggcgcaatggagaataaggggctgaatatctttaactccaaatatgtgctggcccgcaccgacaccgccaccgacaaagattacctcgatattgaacgcgttatcggccatgaatatttccataactggaccggtaaccgagtgacctgtcgcgactggttccagctcagcctgaaagaaggtttaaccgtcttccgcgatcaggagttcagctctgaccttggttcccgcgcagttaaccgcatcaataatgtacgcaccatgcgcggattgcagtttgcagaagacgccagcccgatggcgcacccgatccgcccggatatggtcattgagatgaacaacttctacaccctgaccgtttacgagaagggcgcggaagtgattcgcatgatccacaccctgcttggcgaagaaaacttccagaaagggatgcagctttatttcgagcgtcatgatggtagtgcagcgacctgtgacgactttgtgcaggcgatggaagatgcgtcgaatgtcgatctctcccatttccgccgttggtacagccagtccggtacaccgattgtgaccgtcaaagacgactacaatccggaaaccgagcagtacaccctgaccatcagccagcgcacgccagccacgccggatcaggcagaaaaacagccgctgcatattccgtttgccatcgaactgtatgataacgaaggcaaagtgatcccgttgcagaaaggcggtcatccggtgaattccgtgctgaacgtcactcaggcggaacagacctttgtctttgataatgtctacttccagccggtgcctgcgctgctgtgcgaattctctgcgccagtgaaactggaatataagtggagcgatcagcaactgaccttcctgatgcgtcatgcgcgtaatgatttctcccgctgggatgcggcgcaaagtttgctggcaacctacatcaagctgaacgtcgcgcgtcatcagcaaggtcagccgctgtctctgccggtgcatgtggctgatgctttccgcgcggtactgcttgatgagaagattgatccagcgctggcggcagaaatcctgacgctgccttctgtcaatgaaatggctgaattgttcgatatcatcgacccgattgctattgccgaagtacgcgaagcactcactcgtactctggcgactgaactggcggatgagctactggctatttacaacgcgaattaccagagcgagtaccgtgttgagcatgaagatattgcaaaacgcactctgcgtaatgcctgcctgcgtttcctcgcttttggtgaaacgcatctggctgatgtgctggtgagcaagcagttccacgaagcaaacaatatgactgatgcgctggcggcgctttctgcggcggttgccgcacagctgccttgccgtgacgcgctgatgcaggagtacgacgacaagtggcatcagaacggtctggtgatggataaatggtttatcctgcaagccaccagcccggcggcgaatgtgctggagacggtgcgcggcctgttgcagcatcgctcatttaccatgagcaacccgaaccgtattcgttcgttgattggcgcgtttgcgggcagcaatccggcagcgttccatgccgaagatggcagcggttacctgttcctggtggaaatgcttaccgacctcaacagccgtaacccgcaggtggcttcacgtctgattgaaccgctgattcgcctgaaacgttacgatgccaaacgtcaggagaaaatgcgcgcggcgctggaacagttgaaagggctggaaaatctctctggcgatctgtacgagaagataactaaagcactggcttgataaataaccgaatggcggcaatagcgccgccattcggggaatttacccctgttttctcaggcgagtttcagattcaccacgttgcatcacccgttgcaacacctccgcttccagctccgctaatcgcaccgaccctaatcgacgcggacgggggatatccactgtcaaatccagaccaatttttccctcttcaattaacagcacccggtcagccatcgctaccgcttcgctcacatcatgcgtcaccaacagtacggtaaagccgtgctcctgccaaagtgacacaatcaaatcctgcatctcgagtcgcgttaaggcgtccagcgccccgagcggttcatcaagcaacaataatcccggtcgatgaatcaacgctcttgccagcgccactcgctgtttctgcccgccagaaagtgcggcaggccattcccctgcgcgattctccagtcctaccgcagccaacgctcgacgtgcggcatcgcgccactggcctttaaggcctaacccaacgttatcaatcaccgatttccacggtagcagacgcgcatcctgaaacatcattcgcgtgtcttcctgaatttcagccagcggtgtggtgcccgctaacacatcgcctgcggttggcgtttccagacctgccagcaggcgcagcagggtacttttgccaccaccgctgcggcccaccaccgccacaaactgacctgccggaatatgtaaatccagttggttcaggacgatattttccgcgtaatgtttgcttactgcattgagcaacaatggcgtgccctggttcagacgagcagtattcataccgtggcctccttcaaatgataagccgggttccagcgcaaccagaggcgctctaacagctgcgcgctgacgtcagccagtttgccgagcagggcgtaaagaataatagcgactaccaccacgtccgtttgcaaaaactcccgcgcattcatcgccagataaccaatgcctgaattggcagaaatggtttcggcaacaatcagcgtcagccacatcaggcccaacgcaaaacgcacgccgaccataattgagggcagggcaccaggcaggatcacatggataaacagcggtatgccggataatccatagctacgcgccatctccaccaacccgcgatcgatattacggatgccatgccaggtgttgatataaatggggaatagcgtaccgagcgccaccagaaagatttttgcggattcatcaatgccaaaccacaaaatcaccagcgggatcagcgccagatgcggcacgttgcgcaacatctgaattgaggtatccagcagccgttctccccagcgagatagcccgctaatcagtcccaaaatcaaccccagcgatccgccaattgaaaagccaatcagcgcccgccaggagctgatcgccagatgctgccacagttcgccgctggcggagagcgtccagaacgccgtcaccactccttccggtgaaggcaaaatacgcgtcgacagccagccaaccgaggaggccagttgccacaccgccacgatgcccaccggtaaaaaccagggggcaacgcgcaataaccacttcttcactggcgttgccattatttcttccttagctttgcgcgactttacgggggataaaatcattcgccaccgcttcgccttgcggattcagcggctgcggctggggaatttccgggatggcgacatccagaagcgggaacagcaactcgccaacccgatacgcttcttccagatgcggatagcccgaaagcacaaaactgtcgatgccaagcgcggcatattcgttgattcgcgcagcgaccgtaggaccatcgcccaccagcgccgtcccggcaccgccgcgcactaagccaacgcccgcccataaattggggctgatctccagattgtcgcgcttgccgttatgtaacgccgccattcgctgttgccctacggaatccgtccgggcgaatgcggcctgtgctttggcgatagtttcatcatcaagatgcgagattaaccgctcggcggcctgccacgcttcgtcgttagtttcacgaacaatcacatgcagacgaataccgaaacgaattttgcgtccatgcgcggcagctttcgcccgcacttgttcgattttctctttaaccagttccggcggttcgccccaggtgaggtagagatcaacctgttctgccgccagctcctgggcgacatctgacgatccgccaaagtaaagtggcggatacggctgttgaatcgccgggaagagcagttttgctccgcgcacatgaatatgtttaccgttgaaatcgacggtttctctctgcaataaacgccgccagacctgggtaaattccgccgaggcttcgtagcgctcgctatgatcaaggaacactccgtcgcctgccagctcttgtggatcgctgcctgtgaccaggttaaacaacgcacgtccatttgagagacggtcaagcgtggcggcctggcgggcggcaacggtaggtgaggttacgctgggacgcagggcgacaagaaacttcagccgctgcgtcaccgggatcatcgatgcggcaaccagccacgcatcttcgcaggagcgccccgttggaattagcacaccggtatagccaagacgatccgccgcttgcgcaatttgttgcagataaccgtgatcaaccgggcgtgaaccttcttccgttcccagataatgcccgtcaccgtgggtcggtaaaaaccagaacatattcagactcataattgttttccttccagttgagtgggctgccagatgcgctggcgaatatcgacttttttcggcaccagacgattttcataaaacagatctgccgtttgctgctgtaaggcggcaacctcggcgttaaccggtttgatggtggtaggagggcgatgatctaagtaagaggcaatcaccggtgccggtaagcccatcgtttttgccagtaaagcgatgctttgctcgcgctggctgcgggttaacgcatcggcctcactaaaggttgccagtacgccctgaataaaagcgccgtttttttctgcatagggacgagctgccagataaaacgatccagtttgattgagatcggtgccgtctttcagcacccgcacgccgccctgtaataatgcagcagagtagtagggatcccagatagcccaggcgtcaacgttaccttgctggaacgcggcgcgggcatcagcgggcgtcaggtaagtgggttggatatcggtaaacttaagtccggcctgacgcagtgcacgcagtaaaaggttgtgtgaactggaacctttctgaaaggcaactttgtgacctttaagatcggctacggttttgatcgggctgttttctgccaccagaatcacttcggctttgggcttcggtggctcgacgcccacgtacaccaaatcagccccggcagcctgggcaaagattggcggaatatccccggtactgccgagatcaatactgccaacgtttaacgcttccaacatttgcggacccgcggggaactccacccaggagatttttgattccggatagcgtttttccagtaactggtggctttttgccagcaccataccaatactgcctttctgatagcctatacgtaacgcttcaggcgaggattctgcagcaaccgcaaaagtagagacgctaagcaatcccgccagcgccagtttaatgatgttacgcatgggcattacctcgcagagacagaaggtcaggaacctgaacatcgcggcggtgcaatgcctgccagaaagtttctagcgcggtatcaagacgggtttgcagatttggcgtgaactggggtctgtgatggtaatcaattacttgtgagtcatcggcaaacacgccgtgcaggatctcctgagctttcagtgcgcttaaaactggtttaagggcataatcgaccgccagcagatgggccacggtaccgcccgtcgccagcggtagcaccactttgccttgcaaagcgcgttctggcagcaggtcgagcagggttttcaacgcaccggaataggcggctttatacacaggcgtggcgacaatcagcccatcggcctgttgcagctgttcggtgaaggtcttgagtgccggactatcgaaacgagcataaagtagatcttccggggcgaagttttgcagattccagtgataaacctctacatccaggccatttagtttttcccgcgcatattccagcaaggagctggagcgagaaggaaagcgaggactacccgccagggtgatgacacgcatactctctccttataaccaattgttctttttttgttaacattgataacaattcggtcagtctgtcggagagacaagaaaattccaaatataaattttgtgtatctttttctgaaaataaactaaagaaagggctttatatatcacgcatatttatttattggatagtcattagatgttgaatcaatgaattactcgttcagttaatatttaaatattcatgaaatctataaattaaagatttgtcacttattggatttagtatgcttgatttaaatggcggacaattattgttattattaagtctaatgtcatttaaaggcattatcatatttacgaagagatcaggatgataacgatgaaaaaaagtgtattgacggcgtttataactgtggtatgtgcaacgtccagcgttatggctgctgatgataatgctatcacggatggctcagtaacatttaatggtaaagttattgctccagcttgtaccctggtagctgcgacgaaagattccgtggtgactttgccagatgttagtgccacgaagttgcaaaccaatggtcaggtttctggcgtgcaaattgatgtgccaattgaattaaaagattgtgatactaccgtaacaaaaaatgcaacgttcacctttaatggcactgcggatactactcagattacagcgtttgctaaccaggcctcatctgatgctgctacaaacgtggccctgcaaatgtatatgaatgatggtacaacggccatcacgccagacacagaaaccgggaacattttgttgcaggatggagatcagacgttgacttttaaagttgattatatcgctacggggaaagcgacttcaggtaatgtgaatgcggtaacaaatttccatattaactattattaatagaactcattaattgttttattaattagtacccctccagtgttctggaggggatattcatattttttaagagtgactatttatgaaaacttgcataacaaagggaattgtgaccgtaagtttaacggcaatattactcagctgctcatccgcatgggcggcaggtaaaggcgggattggacttgcagcaacacgtcttgtttattcagaaggtgaagagcaaatttcactgggtgtacgtaacaccagtccggatgttccttatcttattcagtcatgggtgatgaccccagataataaaaaatcagcagactttattattacaccaccgctatttgtgctgaatccggcaaatgagaatctgttacgcattatgtacattggagcgccgttggcgaaagacagagaaacccttttcttcactagcgtacgggcagtcccttcaacaacgaagcggaaagagggaaataccctgaagattgccacacaaagcgtcatcaaacttttctggcgaccaaaaggtttagcgtatcccttaggcgaggctccggcgaaactgcgttgcacttcgtcagctgacatggttacggtcagtaacccaacaccttatttcattaccctgacagacctgaaaataggtggaaaagtagttaaaaatcaaatgatttccccctttgataaataccaattttctctgccaaagggggccaaaaatagcagcgtaacgtatcgaaccatcaatgactacggggcggaaacgccgcaactcaactgtaaatcgtaagccgtcttcagttaagagagcgagatgtatagaactcatcgacaacacagcctgttaagctctggtggagtgccatcgtttattggtgggctggtggtgtttgtgtcggcagcgttcaatgcacaagctgaaacctggttcgatcctgcttttttcaaagatgatccctcaatggtggccgatttgtctcgtttcgaaaaaggacaaaaaataacgccaggggtttatcgtgtcgatattgttctgaatcagacaattgtagatacgcgcaacgtcaattttgttgagataacgccagagaaggggattgccgcctgtttgacgactgaaagcctggatgcaatgggtgttaatactgatgcgtttccggcttttaaacaactggacaaacaagcgtgtgtgccattggcggagattattccggatgccagcgtaacgtttaatgtgaataaactccgtctggaaatttcagtaccgcaaatcgccatcaaaagtaatgcccgtggttatgtcccccctgaacgttgggatgaagggatcaacgcgctattactgggatattcgtttagcggggctaacagtattcatagcagcgcagacagtgattctggcgacagctattttctgaatttaaacagtggcgttaatttaggcccatggagattgcgcaacaattcaacatggagtcgtagtagtggccaaaccgcagaatggaagaatctcagcagctatttgcaacgggcggttattcctctgaaaggcgaactgaccgtaggtgatgattatactgcaggcgattttttcgatagtgtcagctttcgtggtgtgcagctggcgtcagatgacaacatgctgccagacagcctgaaagggtttgcgcctgtggtgcgtggtatcgccaaaagcaatgcccagataacgattaagcaaaatggttacaccatttaccaaacttatgtatcgcctggtgcttttgaaattagtgatctctattccacgtcgtcgagcggtgatttgttagttgaaatcaaagaagcggacggcagcgtcaatagctacagcgtaccgttctccagtgtgccattactccagcgtcaggggcgaatcaaatacgcggtgacactggcgaaatacagaaccaatagtaatgaacagcaggagagcaaatttgcccaggccacgttgcagtggggcggaccgtggggaacgacctggtatggtggtggacaatatgctgaatattaccgtgccgccatgtttggtctgggatttaacctcggcgatttcggagcaatttcgttcgatgcgacccaggcgaagagtacgctagcagatcaaagcgaacataaaggtcagtcatatcgttttctgtatgccaaaacgctcaaccacttgggcactaactttcaattgatgggctatcgctattcgacgtcgggtttctacaccctttccgacaccatgtataaacatatggatggctacgaatttaatgacggtgatgatgaagatacgccgatgtggtcgcgttattacaatttgttttacaccaaacgtggcaaactgcaggtcaatatctcccagcaattaggcgagtacggttcgttttatttaagtggtagccagcaaacttactggcatacggatcaacaggatcggctattacagtttggctacaacacgcaaattaaagatctttcgctggggatttcctggaactacagtaagtcccgtggtcaacctgatgctgatcaggtgtttgctctaaatttttccctgccgctcaatctgttgctccccagaagtaatgatagctataccaggaaaaaaaattacgcctggatgacctctaacaccagtatcgataacgaagggcacactacacaaaacctgggtttaacggagacattactcgatgacggtaacctgagctacagcgtgcaacagggatataacagcgaggggaaaacggctaatggtagcgccagcatggattacaaaggggcgtttgcggatgcccgagtgggctacaactacagcgataacggcagtcaacaacaactgaactacgctctttcaggcagtttagttgcccattcacagggcattaccctggggcaatcgctgggggaaactaacgttctgattgcagcaccaggcgcagagaatactcgtgtggcgaacagcaccgggctgaaaactgactggcgcggatataccgttgttccttatgccacttcttatcgggaaaatcgaatcgcacttgatgcggcgtcgttaaaacgtaacgtggatcttgaaaatgcagtagtcaacgtggttcccaccaaaggggcgttggttctggcggagttcaatgcccatgcgggtgcaagggtattaatgaaaacatcaaagcagggtataccgctgcgttttggcgcgatagcgacgctggacggcgtacaggctaatagcggcataattgatgatgatggctcgctctatatggcgggtttaccggcgaagggaacaataagcgtgcgctggggcgaagctcccgatcaaatttgtcatatcaattacgagcttaccgaacaacaaattaactctgcgattacgcgaatggatgccatatgcagataatctttggagaaaaatgcgtgtcattactacgactattttttgccgccgtcttaatgctatggtgcgctcaaaccgctgcttatagcgggcagtgtcatactactcaggggaatccgtatattggcgtcaattttggcgttaaaaccctggaggaagaagcaaatacggcaggggtagttaaagacaaattttatcagtggaacgaatcgaatgattattatgtttcctgtgattgcgataaagacaatgtcagaagtggccgatgggcattcgccgcggattcaccgttagtctatttaggcgacaactggtacaaaattaatgactatcttgccgccaaagttttattgcaggttaaaggcagttctcctactgcggttcctttcgaaaacgtgggcacaggggggggatacccgatggcatatttgcgaccctggcggtcaacgtttaggtgggcagggggcaagcggtaatagcggtagcttttccctgaaaatattgcagccgttcgttggctcggtcgtcattcctcctatggcgctggcgcgattatatgaatgctacaacatacccgcaggtgattcctgcacgactacaggtacaccggttttagtgtattacctgtctggtacgatcaattcacttggctcatgttccgtcaatgccggagagacaattgaagttgatttaggtgatgtcttcgctgccaatttccgtgttgtagggcataaacctcttggggccagaacggcagaacttgcaattccagtcaggtgtaacacgggaaacgcgggattagttaatgtcaacctgagtctgacggcaaccacagaccccagctatccccaggcgattaagacgtcacgtcctggcgtgggcgtggtggtgaccgatagccagaacaacattatttcccctgctggtggaacattaccgctctctattcctgatgatgcagacagtatcgcgcgaatgaatgtctatccagtcagcacgacaggtgtaccaccagaaaccgggcgatttgaagccacggcaacggtgagaataaattttgattaacgcgtgaacgtatgaagaaaaaaacgatatttcagtgcgttatcttgttctttagcattcttaacatccatgtcgggatggctgggcctgaacaagttagtatgcatatttatgggaatgtggtcgatcagggctgtgatgtcgccaccaaaagtgcattacaaaatattcatattggtgattttaatatcagtgattttcaggccgcgaataccgtaagcactgctgctgatttgaatatcgatatcaccggttgtgccgctggtattactggcgcggacgtcctttttagcggcgaggctgacacccttgcgccgacactgctcaaactaactgacacaggcggaagcggtggtatggcaacggggattgccgtgcaaattcttgatgcgcaaagtcagcaagaaatcccgctcaatcaggtccagcctcttacgcccttaaaagccggggataacacactcaaatatcaacttcgttataagtccacaaaggcgggagcaacgggcggtaatgcgacggcggttctctattttgatctggtttaccagtgaaggagtgatgttgaaacggataatctggattctgttcttattgggattaacgtggggctgtgagctatttgcccatgatggcacggtcaacattagcggatcgtttcgccgtaatacatgcgtgctggcacaggatagcaagcaaatcaatgtgcagttaggcgatgtctcgctgacacgtttttctcatgggaattatggcccggagaaatctttcatcattaatttgcaggattgcggaacagatgtcagcacggttgacgtcaccttttcaggaacccccgacggagtgcagagcgaaatgttgtccattgaaagtggtacggatgcagccagcgggctggcaattgcgattctggatgatgcgaagatattgattccgcttaaccaggcgagtaaagactacagcctacatagcggtaaggtgccattaactttttatgcgcaattgcgacctgtcaatagcgatgtgcagtcgggtaaagtgaatgccagcgcgacatttgtacttcattatgactaatacgtggaacagattggcgttcttgattttcgccgttttatcgctgctggtggcgggtgaattgcaggcaggagtggtggtcggcggaacgcgatttatctttccggcagacagagaatcgatatctattttactgactaataccagtcaggaatcctggcttattaacagtaaaatcaaccgcccaacgcgttgggccgggggggaagcgtcgacagtgccagcaccattactggccgctccgccacttattctcctgaagcccggtacgacaggcacgttgcgcttgctgagaacggaaagcgacatcttgcctgtggatcgcgaaacgctatttgagttaagcattgccagcgtgccatccggcaaagttgaaaatcagagcgtaaaagtggcgatgcgctcggtatttaaactgttctggcgacccgaaggtttgccgggcgacccgctggaagcttatcaacaattacgctggacacggaattcgcagggtgtacaactcactaacccaacgccttattacattaacctgattcaggtgagtgtaaatggtaaagcgttaagtaatgtgggagttgtgccgcctaaaagccagcgtcagacaagctggtgtcaggcaatcgcaccgtgtcatgtcgcctggcgggcgataaatgattacggcgggttgagtgcaaagaaggagcaaaatctgccctgaaacaggttcggaaaacgtttgcgttttttttgccgcaggtcaattcccttttggtccgaactcgcacataatacgcccccggtttgcacaccgggaatccaggagagttcatgtactaccccttcgttcgtaaagcccttttccagctcgatccagagcgcgctcatgagtttacttttcagcaattacgccgtattacaggaacgccgtttgaagcactggtgcggcagaaagtgcctgcgaaacctgttaactgcatgggcctgacgtttaaaaatccgcttggtctggcagccggtcttgataaagacggggagtgcattgacgcgttaggcgcgatgggatttggatcgatcgagatcggtaccgtcacgccacgtccacagccaggtaatgacaagccgcgtctctttcgtctggtagatgccgaaggtttgatcaaccgtatgggctttaataatcttggcgttgataacctcgtagagaacgtaaaaaaggcccattatgacggcgtcctgggtattaacatcggcaaaaataaagatacgccagtggagcagggcaaagatgactatctgatttgtatggaaaaaatctatgcctatgcgggatatatcgccatcaatatttcatcgccgaataccccaggattacgcacgctgcaatatggtgaagcgctggatgatctcttaaccgcgattaaaaataagcaaaatgatttgcaagcgatgcaccataaatatgtgccgatcgcagtgaagatcgcgccggatctttctgaagaagaattgatccaggttgccgatagtttagttcgccataatattgatggcgttattgcaaccaataccacactcgatcgttctcttgttcagggaatgaaaaattgcgatcaaaccggtggcttaagtggtcgtccgcttcagttaaaaagcaccgaaattattcgccgcttgtcactggaattaaacggtcgcttaccgatcatcggtgttggcggcatcgactcggttatcgctgcgcgtgaaaagattgctgcgggtgcctcactggtgcaaatttattctggttttatttttaaaggtccgccgctgattaaagaaatcgttacccatatctaattatttcttcgaattcctctttataagataatcagggctttattttcagccctggttgttttatattcatcgctgttgcttatttagacattttgtacttttattgttgaggttattaagcgaagcgacaatggattgtgttgctgcggttttatagggtaggggagaggcagatgcgaattaaaccagacgataactggcgttggtattacgatgaagagcacgatcgaatgatgctcgatttagccaatggtatgctatttcgctcacgttttgcgcgcaagatgttgactccagatgccttttctcccgcaggcttttgcgttgacgacgccgcgctctatttctcttttgaagaaaagtgccgcgattttaatttatctaaagaacaaaaagccgaactggtgctgaatgcactggtagcaattcgctatctcaaaccgcaaatgccgaaaagctggcattttgtttcccatggtgaaatgtgggtgcccatgccgggcgatgcggcctgcgtttggttgagcgatactcacgagcaggtcaatttgctggtcgttgaatctggcgaaaatgccgcactatgcctgctggcacaaccctgcgttgttattgcgggtcgcgcgatgcagttgggcgacgccattaaaatcatgaacgacaggctgaaaccgcaggttaatgttgacagcttcagcctcgaacaggcagtctaacgcgccaacttaagtgcagtcttcggtacacagctacagcaaagaatggtgccatcatcgcccattgctgattttttcagcggcgtgacttcgccttctaaaagctgaacacggcaacttccacaaatgcccgcgcggcaagaataagggatacgaattccctgattttctaattgctccagcaacacctgttggttatttccacgaaatgcctgtccctgccagtcaatatctacatttgcgtccggttgttgcgtgatgttggcggtatcatcagcggcagctgcgccgtaaatttttgccggagccgttgccagaatttccacctcatcgccaacgcgaatcacgccgctattacgggcaattaaattctgaccaaaatcgacatcgccgttatcctgggcagtgcggaaagattgcaatgtttttaatggttcgcctgccggatgtttttgccctttttctgggctgacggtggtgaaaatacagcggctacaaggtttaaccacatcaaacaccacatcaccaatgcgaatcactttccagcgatcttcttcccaggctgacgcgccggaaaccaccagattggggcggaattgctccatttttacactggccggacaacgttgttggagatcacgtaacgaggcttcgttagcaagaaggtaaggatagccatcagcaaatgacagaggtacagtgttgtggcgtttcacgcgccgggtcatttgtggccccacccagcgtaattgcacttcgcgggagaaaaatccacttagccatttgttgatcgcgtctggcgcaattcgcgcggtaaaatgtgtgccccaaacttcggttggtgcgtcttgtgtggcgaaatcagcaaaacgaacatatgcgctactgccatctggtgcggtgagatgcaagccatcatgcacaggtgaaggagtaaaccgtaccatctggggaaactggcgagcggtaataaacgtaccgtcaggttccgtgatcataaagatgcgatcgaaggccagaccactgacatctgccagagcatgtgtaagaccaatgccgcgcatcgatttaacaggatgaataaaaagccggattaatgtcgccacggtgcggtcctcaaatgaaaataagccctcaactttatgacatgacgcgcttattagctataatgcgcaacaattttcttagcgcctgtcccattaggctattttatttgtcagtttggccctgggttatgctcgaaatcctcacgtacttgtgtacgctccggtttctccgcgctgtccatgtccagactgactgcaacaattacgcctactgcggtaggctcttagagtaaaagtgacgatatgaattctctgtttgccagtacggcccgtgggctggaagagctgttaaaaactgaactggaaaacctgggggccgttgaatgccaggtggttcagggtggggtccatttcaagggcgacacacggcttgtttaccagagcctgatgtggagccgcctggcctcgcgtattatgttgccgctgggcgagtgtaaggtttacagcgatttagacctctatctcggtgttcaggcgatcaactggacagagatgtttaatcctggcgcgaccttcgctgtccacttcagtggtttgaatgacaccatccgcaacagtcagtacggcgcgatgaaagtgaaagacgcgatcgtcgatgctttcacgcggaaaaatctgccgcgtccaaatgttgatcgcgatgcgccggatatccgcgttaacgtctggctgcataaagaaaccgccagtatcgctcttgatctgagtggtgatggtttacatctgcgtggctatcgcgatcgtgctggtattgcgccgatcaaagaaaccctggcagccgctattgtgatgcgatccggctggcagccaggaacaccgctgctcgatccgatgtgtggttccggtacgttgctgattgaagcagcgatgctggcgaccgatcgcgcaccaggcttgcaccgtgggcgttggggctttagcggctgggcgcagcatgatgaagctatctggcaggaagtgaaagcggaagcgcaaactcgcgcccgtaaaggcctggctgagtatagctctcatttttacggttcggacagcgacgcacgggtgattcaacgtgcacgcactaacgcccgtcttgcggggattggtgaactgatcacctttgaggtgaaagatgtcgcgcaactgaccaatccgctgccgaaagggccgtacggcacagtgttgagcaacccgccatacggggaacgtctggacagcgaaccggcgctgattgcgctgcatagcctgctgggtcggatcatgaaaaaccagtttggtggctggaatctctctttgtttagtgcctcgccggatctgctaagctgcttgcagctgcgtgcagacaaacagtacaaggcgaaaaacggcccgctggactgcgtacagaaaaattaccacgttgccgaaagcactccagacagcaaaccggcgatggtagcggaagactacaccaaccgcctgcgtaagaacctcaaaaaattcgagaagtgggctcgccaggaagggattgaatgttaccgcctgtatgacgccgatctgccagaatataacgttgccgttgaccgttatgccgactgggtggtggtgcaggagtatgcgccgccaaaaactattgatgctcacaaagcgcgtcagcgtctgttcgatattatcgctgcaaccatttcggtactggggattgcgccaaacaaactggtgctgaaaacccgtgaacgccagaagggcaaaaaccaataccagaaactgggcgagaagggcgagtttcttgaagttaccgaatataacgctcacttgtgggtgaacctgacggattatctcgatactggtctgttcctcgatcaccgcatcgcccgtcgtatgctcggtcagatgagcaaaggcaaagatttcctcaacctgttctcttataccggcagcgccaccgtgcatgcgggattaggcggtgcacgcagcaccaccaccgtggatatgtcgcgtacttatctggaatgggcagaacgcaacctgcgtctgaatggcctgaccgggcgtgcgcatcgcctgattcaggccgattgcctggcgtggctgcgtgaggcaaatgaacagttcgatctgatctttatcgatccgccaaccttctctaactcaaaacgaatggaagatgcgtttgatgttcagcgcgatcatctggcgctgatgaaagatttgaaacgtctgctgcgtgcaggtgggacgatcatgttctcgaacaacaaacgtggcttccgtatggatctcgacggcctggcaaaactgggactgaaagcacaagaaattacgcaaaaaacgctctcccaggatttcgcccgtaaccgccagatccacaactgctggctgattaccgcagcctgaaaggaatagtaatgtcattaatcagtatgcatggcgcatggctgtcgttcagcgacgcgccgcttctcgataacgcagaactgcatatcgaagataacgaacgtgtttgtctggtgggccgcaacggcgcaggcaaatcgacgttaatgaaaatcctcaaccgtgaacaagggctggatgacggtcgcattatttacgagcaagatttgattgtagcgcgtctgcaacaggatccgccgcgtaacgttgagggtagcgtttatgatttcgttgccgaaggcattgaagaacaagcggaatatctgaaacgctatcacgatatttcgcgcctggtgatgaacgacccgagcgagaaaaatctcaacgaactggcgaaggttcaggaacagctggatcaccacaacctgtggcagctggaaaaccgcatcaacgaagtgctggcgcaactggggttagatcctaacgttgcgctgtcgtcgctttccggcggctggttgcgtaaagcggcattaggacgcgcgctggtgagtaatccgcgcgtgctgttgcttgatgaaccgacaaaccacctggatattgaaaccatcgactggctggaagggtttttgaaaactttcaacgggacgattattttcatctcccacgaccgttcgtttatccgcaatatggcgacgcgcattgttgatctcgatcgcggcaagctggtgacctatccagggaattacgaccagtacctgctggaaaaagaagaagccctgcgcgtggaagaattacaaaatgccgagttcgatcgcaaactggcgcaggaagaggtgtggatccgccaggggatcaaagcacgccgtacccgtaatgaaggccgcgtacgcgccctgaaagcgatgcgtcgcgaacgtggtgaacgtcgcgaagtgatgggtaccgcaaagatgcaggtggaagaggccagccgctccggtaaaatcgttttcgaaatggaagacgtttgctaccaggttaacggtaagcaactggtgaaagatttttctgcccaggttctacgtggcgacaaaattgccctgattggtccgaatgggtgcggcaaaaccacgctgctaaaactgatgctcggtcagcttcaagcggacagcgggcgtattcacgttggcaccaaactggaagtggcttatttcgatcagcaccgcgcggaactggatcccgataaaacggtgatggataaccttgccgaaggtaagcaagaggtgatggttaacggcaagccacgccacgtattgggctatttgcaggactttctgttccatccgaaacgggcgatgacgccggtacgtgcgctttctggcggtgagcggaaccgcttgctgctggcgcgtttgttcctcaaaccaagcaacttattgattcttgacgaaccgaccaacgatcttgatgtcgaaacgctggaactgctggaagaactgatcgacagctatcagggcacggtattgctggttagccacgatcgtcagtttgtcgataacaccgttacagaatgttggatcttcgaaggcggcggtaaaattggtcgttatgtcggcggttatcatgatgcccgtggtcagcaagagcagtatgtggcgctcaaacagcctgcggtgaaaaaaaccgaagaagccgccgcggcaaaagcagaaactgtaaaacgcagcagtagcaaactaagctataaattgcagcgcgaactggagcagctaccgcaattgctcgaagatctggaggcgaagctggaagccctacagacgcaagtggcggatgcttccttcttcagtcagccgcatgagcagacgcaaaaagtgcttgctgatatggctgctgcagagcaggagctggagcaagcctttgaacgctgggagtatcttgaagcgttaaaaaatggtggctgatcgcaaaatagtcgatttaaacagagacagctgacaacggtaaaattgcctgatgaactgggtttatcaggcatgaaaaccaacactttgttagtcatctgtaaaatagcgcatcattaaggagtaccaatgtgcgaacatcatcatgccgcgaagcacatcctgtgctcgcagtgtgacatgctggtggcgttaccgcgccttgagcatggtcagaaagcggcatgtccccggtgtggcacaacgttaaccgtggcgtgggatgcccctcggcagcgtcccaccgcctatgcgttggctgcactgttcatgctgttgctgtccaacttgtttccttttgtgaatatgaacgttgcaggagttaccagtgaaattacattactggaaattcccggcgtgcttttttctgaggactacgccagcctcggcacctttttcctgttgtttgtgcaactggttcccgcgttttgtctgataaccattctgttactggtgaatcgcgcggaattaccggtccgtttaaaagagcaactggcacgggtgctttttcaactcaaaacctggggaatggcggagattttcctcgcgggtgtgctggtcagtttcgttaaactgatggcttacggcagcattggggtaggcagcagctttctcccctggtgtttattttgtgtcctgcaactgcgcgcttttcagtgcgttgatcgtcgctggttatgggacgacatcgccccgatgccagaactgcgccagccgctaaaaccaggcgtcacggggatacgtcaggggctgcgttcgtgctcctgttgtacggcaatccttcctgctgatgaacccgtgtgcccgcgttgtagtaccaaagggtacgttcggcgtagaaacagcctgcagtggacactcgcgctgcttgtaacgtccatcatgctgtatcttccggctaatattttgcccatcatggtgacggatttattaggctcgaagatgccgtcgacgattctcgctggggtcattctgttatggagcgaaggctcttatcccgtcgctgcggtgatctttctggccagtattatggtgccaacgttaaagatgatcgccatcgcgtggctgtgttgggatgccaaagggcatggcaagcgcgacagtgaaagaatgcatttgatttatgaagttgttgagtttgtaggccgctggtcgatgattgacgttttcgttatcgcggtgctctcggcgctggtgcgtatgggaggtttaatgagtatttatccggcaatgggtgcattaatgtttgctttagtcgtcataatgacaatgttttctgctatgacgtttgacccgcgtttgtcgtgggatcgtcaacctgaatcagagcatgaggagtcctgacagtatggaatctaataatggggaagccaaaatccagaaagtgaagaactggtctcccgtgtggatatttcctatcgtcacggcgctcattggggcctgggttcttttttatcattacagccatcagggaccggaagtgaccctgatcaccgcgaatgcggaaggaattgaaggtggcaaaaccaccattaaaagccgtagcgttgacgtcggcgtggttgaaagcgccacactggctgatgatttgacgcacgttgaaatcaaagcgcggctgaattccggtatggaaaaattgctgcataaagacaccgtcttttgggtggtgaaaccgcagattggtcgcgaagggattagcggcctgggaacgctgctgtctggagtttatatcgaactgcagccaggcgcgaaaggcagcaaaatggataaatacgatttgctggactcgccaccgttggccccgcctgatgcgaaaggtatccgtgtgattctcgatagcaaaaaagccgggcagctctcgccaggagatccggtgctgttccgtggctatcgggtaggttcggttgaaaccagcaccttcgatacacaaaaacgcaatatcagctatcaactgttcatcaatgcaccttatgaccgactggtgaccaacaatgttcgcttctggaaagatagtggcattgcggttgatctgacgtcagcagggatgcgtgtggagatgggctcattgacaacgctgctgagtggcggtgtcagctttgatgtgccggaaggtctggatttagggcagccagtggcaccgaaaacagctttcgttttgtatgatgatcagaagagcattcaggattcgttgtacaccgatcacattgattatctgatgttctttaaagattcggtacgcggtctgcaaccgggagctccggtagagttccggggtattcgcctgggtaccgtaagcaaagtgccattctttgcgccgaatatgcgtcagacatttaacgatgattaccgtattccggtactgattcgtatcgagccagagcggctgaaaatgcagcttggcgaaaatgcggatgttgttgagcaccttggcgaattgttgaaacgtggtttacgcggatcgctgaaaaccggaaacctggtcactggtgcactgtatgttgatctcgatttctatccaaatacgcctgcaataaccggtattcgtgaatttaatggttatcagattatcccgaccgttagcggcggcctggcgcaaatccagcaacgactgatggaagcgttggataagatcaacaaactgccattgaatccgatgattgaacaggcaaccagtacgctttctgaaagtcagcgcacaatgaaaaacctgcaaacgacgctggatagcatgaacaagatcctcgctagccagtcgatgcagcagttgccgacggatatgcagtcaacgttgcgtgaattgaatcgcagcatgcagggcttccagcctggctccgcagcctacaacaagatggtggcggatatgcagcgccttgatcaggtgttgcgagaactgcaaccggtgctgaaaacgctcaatgagaagagtaacgcgctggtatttgaagcgaaggacaaaaaagatccagagccgaagagggcgaaacaatgaaaaagtggctagtgacgattgcagcactgtggctggccggatgcagctccggcgaaattaataaaaactattaccagttacctgtggtgcagagcggtacacaaagtaccgccagccagggcaatcgtctgttatgggtagagcaggtcactgttcctgactatctggcggggaatggtgtggtttatcaaaccagtgatgtgaagtatgtgattgccaacaacaacttgtgggccagcccgttggatcaacagttgcgcaacaccctggttgccaacctgagtacgcaactgcccggctgggtggttgcctcccagcctctgggaagcgcccaggacacgctcaatgttaccgtaacggagtttaacggtcgctatgatggcaaggtcattgtcagtggtgagtggctgttgaaccaccagggacaactgatcaaacgtccgttccgtctggaaggagtgcaaactcaggatggttacgatgagatggttaaagtgctggccggtgtctggagtcaggaagccgcttctattgcacaagagataaagcgtctaccttaattataaagatttgtaaatataaccgtctccggtatgttgcctgaggcggtttttttgtctctaacgtgcggaaaaatttgttcctcttcacattttttgtacaaccgacatgcccgtgtagctcacaaatatgacagtggcgtgaattttgcgcattgacggcagttatgattcgcggtattgcttaactgtgattgcacatttagtaatcactgttttcttttccaccagaaaccagtatgagggaaacgaggcatgaagagacaaaaacgagatcgcctggaacgggcacatcaacgtggttatcaggccggcatcgccggacgctcaaaagaaatgtgtccctatcagacgctgaatcaaaggtcacaatggctgggaggctggcgagaagccatggcggacagggtagtaatggcctgattctgtctctttaaaaagaaacctccgcattgcggaggtttcgccttttgatactctgtctgattataatcagaaggcagacgtatcctggaacagaccgactttcaggtcgctggcggtatagatcagacgaccatcaaccagcacttcgccatccgccaggcccataatcagacgacggttaacaatgcgtttaaagtgaatacggtaggtcacttttttcgctgtcggcagtacctgaccagtgaatttcacttcaccaacgcccagcgcgcggcctttaccttcgccgcccagccagccgaggtagaaccctaccagctgccacattgcgtccaggcccaggcatcccggcataaccggatcgccaataaagtggcatccgaagaaccacagatccggattgatatccagttctgcttcaacataccctttgtcgaagttaccacccgtttcggtcattttgaccacacggtccatcatcagcatgttcggtgctggcaattgcgggcctttagcgccaaacagttcaccgcgaccagaggcaagaaggtcttcttttgtataggattcgcgtttatctaccatgttctctgtaagccttattttattgaagcacgcaggatagctaacacgtgtacgctgaacaagtccgatcagttcggaataaaccagttcagccaacgtaatggccatggaaaacggtgacgtccttcctgttgcgatgcttgcgcgatacgttcctggatggtttgcatcagcgtcgtttggccttcgccatcccacaccagatttaataataacggcagtgcgtcagtcacatcgtctactgcccagatggtgaatttgccttcttctaccgctttcaccagttcactgtgaagacttaaatggcgaacgttagctgtggggataatgacaccttgtttcccggttaactcacgttgctggcaaatagcaaagaagccttcgattttctcatttaaaccaccgaccggctgggcgcgaccgaactgatcgactgaacctgtgatagcgatactctgattcaccggcacatcggcgagggcgcttatcagggcgcagagttcagccatcgaggcactatctccatcaacttcactgtatgactgctcaaatgtcagcgatgctgagaaggggatctgttgctcaagctgtagttccgacatcaggaacgcttgcatgatcatcatccctttcgcatggatattgccgccaagctccgctttgcgttcgatgtcggtgaattcaccatcgccaatatgcacaacgcagctaatgcgagaaggttcgccaaaagcgcgtggatgacccggaaattcaatgaccgaaagggcgttaatttgcccgatgcgttcgccttcggtttcaatcaggatttgctcctgaaggatctcatcctgcatacgttcagcgaggaaaccttcgcgccattcacgctgctgcagcattaagtttagctgctcgccggagaaggtgtcgccatcacacagggaggcgacctctttacactggcggaggatccactgcgggctaagcggaagtgtttcttgttcaccggtgtagcgtgctgcttcgcggataagtatcggccaggcatccgctcccggtgcaggtaagtgattatgtctggcggtaaatgtcacccagcgacaccactgggttactgactccgcatcgacaatctgcagagtatcttcaaattcgctataaatagcctgctctgaaagctctggctccatctcctggaaatcagccaatgattcgcgttcgcctaccagaatgactttcagcttcaatggcatcgaaggcacagagacggggagagggcgcgactcatcaaacgcaacccagtcaaaacgctcgcggttaacgatatttttcagccgcatccacagcagaggttgcgccagcagtgtacgcaaagagataatgagaataccgccatttgcctgatgcaccagaccaggctgcagggtaatgtcgccattaaactggcgcaggcagccaaagagttgctccgcttctacccagtcggcagcgacaacttgcgttaaagtcgcaaaattatcatctgcactcactgcgtgacgtaagcggatggagtggccggaaacctcatagtgaccgcccaccagttggcctgcatcgctttgtagcgtacgcgcggcattggcaataagattcagatactcagactcttccggggccttcgccagcataaaagaggaggatgctcgcgtatgcagcaactgctccagcgcaaattgcagccgcggttgagtatcactgaataaaggatcgttttcgtcaatcaaatgtggctgagcaaatatttcctgatagctatcggtatcaggaaccaggtcacgccatgcaagtttcgtaatggtcaaagttgatgttttttagtctgttgtcaaagccgcgattataccgtaaccggcactacagcacacgtagaaagcaccgacaatactcctggcatgggcgttaaagctcacaggatggagattcttttcttcactggcctaaaaagctgatattctgtaaagagttacacggtaacattgagatcgctatgaaatatcaacaacttgaaaatcttgaaagcggttggaaatggaagtatttggttaagaagcatcgcgaaggggagttaatcacccgttacatagaagccagtgccgcccaggaagccgtcgatgtgttgctctcgctggaaaatgaacccgtgctggtaaatggctggattgacaagcatatgaatccggaactggtcaatcgcatgaagcaaaccattcgggcaagacgaaagcgccattttaatgcggaacaccagcatacgcgcaaaaaatcgatcgatctggaatttattgtctggcaacgtctggctggtcttgcgcagcgtcgcggtaaaacgctttctgaaacgattgttcagctgattgaagatgcggaaaacaaagagaaatacgcgaataaaatgtcttctctgaagcaggatctgcaggcattgctgggtaaggaataactgacgaaagtcagttcaatttactaaaggcaaaaaaaaccccgcagcagcggggtttttctaccagacgagaacttaagcctgcggctgagttacaacgtctttgatacctttaacttcgatctctacgcgacgatccggagccaggcagtcgatcagtgcagcacgctgtttcacgttgtcacaggtgttgccagtaaccgggttggattcgcccataccacgtgcggagatcttgtctgccgggatacctttggagatcaggtaatcaacaacagactgagcacggcgctcggacagaccctggttgtaagcgtcagaaccgatgcggtcggtgtaacccagaacaactacggaaccgtctttcggatccaggttgctcagctggctgtacagctgatccagagcagcctgaccttccggtttcagggttgctttgttgaagttgaacagaacgtcagacttcagagtgaagtgcttggtctgtacttccggtgccggagctggagccggagcaactactggagctgcttcgccctgaccgaaacggtaggaaacacccaggctcagcatgccgttgtccggacgagtgccgatggtgtgtgcgtcaccgatgttgttggtccactggtattccagacgggtagcgatttcaggagtgatcgcgtactcaacaccgccagcgaagaccggagaaacgccggtgtcgtggtttttaccataaacgttggatttagtgtctgcacgccataccatgccacccagacgagtgtagatgtccaggtcgtcagtgattgggtaacccagtttagcggtcagttgaacgccctgagctttgtatgcaccgttttcaacgctgcctttgtacggcatacgacctaaccagtcgtaacccatttcaaagccaacatacgggttaacctggtaaccaccaaaagcaccagcgcccagttggttttcatgggtcgggccattgttgttgatgaaaccagtgtcatggtactgggaccagcccagtttagcaccagtgtaccaggtgttatctttcggagcggcctgcgctacggtagcgaaaccagccagtgccactgcaatcgcgatagctgtctttttcattttttgcgcctcgttatcatccaaaatacgccatgaatatctccaacgagataacacggttaaatccttcaccgggggatctgctcaatattaactctaccgatatcttcggcttatgccgagcacccctggcgatgtaaagtctacaacgtagttgaaaacttacaagtgtgaactccgtcaggcatatgaaaaaaaagtcttgtataaggtatgtttaatcttttttgtcagcgacaatttacagaagagaatcgcggaaaccgcttcagacaagcctccgcaaggaaaattagtcacgactgaaagcattggctgggcgacaaaaaaagttccaggattaatcctaaatttacttaatgatacaaattagagtgaatttttagcccggaaagttgtctcgtggcgtgagaggatgcgcttaccggacgcataataaaccccatagcgttacctccatttgccgcatcaacaagttcagcatgctcttcttcagtcaaatcatctgccaaccaaccgatcaccacactgtaattgcccgtgcgtaaagcgcgaaccattgactccacagtgtggcaaggggagagctggctaatctgcattactttcgttaagggtagcccagatgcctgaacccattcccgactcagtttttgttgcggtgttaaccagagttgccagcgcgattgctgaccgagttgctgtaacaatggcaacagtagaagttgcgtcatcatgggctgatcttcgcgatagacaacttcactgataagcccggctgtagtgttttccgtagagacacgcgcaattttacttgctgcggatgagaacgacgaagaacgatgtgcatagcctgaagtgtacataatcaatccagcccctgtgagttactgtatggatgtacagtacatccagtgacaacaaagatcaaccctattttcggaaagagcctcgcaaattttgtcgttggtgacgggaaaacataaattaatcttgccccttaagaataagttgcctattttcgtagttaacggatccgttaatgtgaatcattcttttatgttatgattttaaaaggaattttatgaaaagcctctcctataagcggatctataaatcacaagaatacctggcaacgttgggcacaattgaataccgatcattgtttggcagttacagcctgaccgttgacgacacggtgtttgcgatggtttctgatggtgagttgtatcttcgggcttgtgagcaaagtgcacagtactgtgtaaaacatccgcctgtctggctgacatataaaaagtgtggccgatccgttaccctcaattactatcgggttgatgaaagtctatggcgaaatcaactgaagctggtgcgtctgtcgaaatattctctcgatgcagcgctgaaagagaaaagcacgcgcaatacccgggaaagactgaaagatttgcccaatatgtcttttcatctggaagcgattctcggggaggtggggattaaggatgtacgggcgttacgtatacttggggcaaaaatgtgttggttgcgactgcggcagcaaaacagtctggtgacagaaaagattctgtttatgcttgaaggtgccattatcggcattcatgaagctgcgctcccggtggcacgccgccaggagcttgcagaatgggctgactctcttacgccgaaacaggagtttcctgcggaacttgagtaatctggcgttgcagacgaccaatctcaggcagtaatgcaatcaataatccaacttgttgtacgaccagaggttctttgctgtctgcccgtggttcaagttgctgcatccgctgtttcaggctagctaatgcctcattgacgcgttcttcatcagcaggttgatgatgtaacgcgtcatcaacatagcaaactgcgtcatcaagaaacgccagaatttcaggattagttaactgctcccggtgagcaccgagggctgagatatagctggtaaacgtatggttaaggcacagcaaccgaaacgcggcttcgcgaatttgcggggtaacgttcggctcgctggacatatttgataccaccgacgccagctcagcatcacggttgtgtgcatcgcggcgggcaatacgatacgccagacggttatcacgcccctgatggtattgctccagtatggcatcgagataccgacagttggcctctgtggcgcgttcgagcatgcgcggcagattgcgaaactgccagtcaggccagatgtagctcactgccgcccacgcaatggcacaaccaatcagcgtatcgattacgcgaggtaacgctacttcaaaaccttcacccagtaagttaaaacacagtagcaccaaaagtgtgatgaacatcgttgcatgagcgtattgcacgttacggaaggcaaaaaagagcacgccggtaataaccagcagcaccagctgcccttccagtgatggcacaaaccacagcacaggaatgccaatggcgatacctaccagcgtaccaataatccttaacttcaggcggtggcgcgtggcgttatagtttggctggcagacaaacaaacttgtcagcaagatccaatacccgtgatgcattccggttatctgaatgatggcgtagccgaagcacaacaccagcgacattcttaccgcatgacggaagagggcggattccggcgtgaagtgacggctaagacgcagccagatatcactcaacccgtgcgggctgtcatcagcgagctcattttcgtcattattatggggtagtgcctgggcctgttctgattcaattgttgccagttgggcatcaatggcgcgtaaattgttcagcaaaaatcccagtgttttgagtaaatcggcgggtgcgccgttatcgcgcatccgctccagcgcagcatcaatatgcgtaaaagcgcgctcaaaatgcggatcatgttgataaggctgacgcaacaaaatacagcgtgacagttgctggcacgcctggccctgcatcgacatcagccgctgaaaacggaacagcacgtcgctgtggcgaaaatgttcacgcaatgtttgatactgaatatgagaagagctggcacgctcgtgaatatcctgtgcgacaaagtaataatgcagcgtgcgacgcgttccccgttgaccacgatcgccacgtaagcgggtcagcagcgagagtttcgtctgattcaatgtcgccatcagcagaccgttggcgagagccaaatcgtacagcggtgcctggctttgatcttcaatatcaggatcaaacatgcgcgacttgagctcaagataacgcgccagttgttcatagcaacgcgccaggttgtcctgcagcgggcggaccgggaacagcagatgaccaataagtgtcaggacgttgtaccagacggcaccggccagcagatacatcggctgctgataccagtgctcatacagtgatgttcccaacatagtgtaaatggcgatcagcaatgcaccgaaggcaattgttgcatagcgttgacccagaccgccgagcaaaatgaagccgctggtagagagcgttaagccaatcgcaaatagccagggccagggaaacagcaattctactgaggccgaggcgataaaaaagcagaacagcgtaatgatgaggttacgcaaacgtcccgccagtcggtcatcgagatcggtcagcgccgctgccaccatccccagcgttagcggaatcgtcagttttacatcacccagccaccacggaaacgctgtggttccacaaagcgcaataaaaatacgcgcgtaatacagccaggcgctgttccaggtatagcgtttgagcaaaggacttagcataaaggccatattagtggattattcaaaacgacgacgtgcattggcttcacgcgcagcttgcgctgtttctaccgataccacgcgacgaccaaccggccatagtgcaatagcggcaattttaaagttcgcaatgccgacaggaatgccaatgattgaaatacattgtacgatgcccgttgcaatgtgcatcaggcataaccaccagccaaagaaaatcagccagaaaatattcaataccgtaccgccagtattcagcagcacatttttgccagccgggttcagttcatcgacatgaatagcttcattgccataaggcaccagagacagtttagtgatctcccagcaggatcgtgtcagcggtaaggtaaaaatcagcacaatactgaccagagtcgccaacagccagcccagagtggtggcaaatccgccaagcacaaagttcagaatgttcaaaacggtacgcataaaacctcgctttactgtggttttcagtaatgggcggcaattgtaacgtttttttgggctggagcacgttttctctgacggttacactgataagaaataatttcgtgtggatctacagagtcatggaactgaaagcgacaacgcttggaaaacgtctggcacagcacccttacgatcgggcggtgatcctcaatgccgggattaaagtctccggcgatcgccacgaataccttattcctttcaatcaattactggcgattcactgtaagcgcggtctggtatggggcgagctggaatttgtactgccggacgaaaaagtggtgcgtctgcacggcaccgaatggggcgagacgcagcgtttttaccatcatcttgatgctcactggcggcggtggagtggcgagatgagcgaaattgcgtctggtgttttacgccagcaactggatttgattgccacgcgcactggggaaaataaatggctgacgcgtgagcaaacctctggcgtgcagcaacaaatccgccaggctttgtcggcgttgccgttgccggttaaccgactggaagaattcgataactgccgtgaggcgtggcgtaaatgtcaggcctggttgaaagatattgaaagcgctcggttgcagcataaccaggcgtataccgaagccatgcttaccgagtatgcggattttttccgccaggtcgagtcttcaccgctgaatccggcgcaggcccgggcagtcgttaatggcgagcattctctgttagtgctggcaggtgcaggaagcggaaaaacgtcggtgctggtggcccgtgcaggctggttgctggcgcgtggtgaagcgtcccctgagcaaattttattgctggcgtttggtcgcaaagccgctgaagagatggacgagcggattcgcgaacggctacataccgaagacattaccgcacgcacgtttcatgcgctggcgctgcatattattcagcagggcagcaaaaaagttccgatagtcagcaaactggaaaatgataccgctgcccgtcatgaactctttattgctgagtggcgcaagcaatgcagcgaaaagaaagcgcaggcgaagggctggcggcaatggctgacggaagaaatgcagtggtcagtgccagaaggtaacttctgggatgatgaaaaattacagcgtcgccttgcctctcgcctcgatcgctgggtaagtctgatgcggatgcacggtggtgcacaggcagaaatgattgccagtgcacccgaagagattcgcgatctgttcagtaaacgtatcaagttgatggccccgttattaaaagcctggaaaggtgcgctgaaggcagaaaacgctgtcgatttttcgggccttattcatcaggcgattgtgattctggagaaaggtcgctttatcagcccgtggaagcatattctggttgatgaatttcaggatatctcgccgcagcgggcagcgttgttagcagcattacgcaagcaaaacagtcagacgacgttgttcgctgttggtgatgactggcaggcgatttaccgattcagcggtgcgcaaatgtcgctcaccaccgctttccatgaaaactttggtgaaggcgaacgctgtgatttagacacgacttaccgttttaacagtcgtatcggtgaggtggcaaaccggtttattcagcagaacccaggccagctgaaaaagccgctaaacagcttaaccaatggagacaaaaaagccgtcacgttattggatgagagtcaacttgacgctttgctggataagctctctggttatgccaaaccggaagagcgcattctgatcctggcgcgttaccatcacatgaggcctgccagcctggaaaaagcggcaacacgctggccgaagttgcaaatcgactttatgaccattcatgccagcaaagggcaacaggcggattacgtcatcatcgttggcttgcaggagggaagtgatggttttccggctgcggcgcgggagtcgattatggaagaggcgctactgccaccggttgaggatttcccggacgctgaagaacggcggttaatgtacgtggcgctgacccgggcacgccatcgggtatgggcactgtttaacaaagagaatccctctccctttgtggaaatactgaaaaatctggatgtgccggtggcgagaaaaccgtaagaaacaggtggcgtttgccacctgtgcaatattacttcagacggtccgcgagataacgctgataatcggggatcagaatatcgaccgcgtcgttgaaatgcggcgactggattatgaagtctgccgttgccacgttggtggcgaccggaatgttccataccgtcgccagacgcagcaaggctttcacgtcaggatcgtgcggcacggcatttagtggatcccagaagaaaatcaatacatcaattttcccttctgagatcaatgcgccaacctgctggtcaccccccattgggccactcaacatcgcgttgacgttcatgccggtcgcgcgggaaattaagttaccggtagtgcctgttgcatacagtacgtgttgttccagtaacggttgatgccgttccacccagctcatcagcatttctttgcagtgatcgtgtgccaccagcgcaatatgtttccgcgcaggtaaagtgcgagtcgtcagttccataatgtacatccgtagttaactttcctacagattactgtaagcacttatcgctgcaagataaagaccgaaaaagcctgcgcacaggcacaaaaatctcaggaagatggttgtttttccgcccactgcaggaaagtatttcgcgtttgtgggtcagccagtttaaaccaatacttcagccgttgttctgtgagcacctgagactgcggtggaatagcatccagctcggaaacacccgaaagcagcgtactgtcatctgccatcatcgtggcaaattgcggtagtgaagcgcgtttcgcggatttgttatagcgttcaacctcgacctcataatcaatcgtttttgccgttgaggtaatggcgagaatatccagctttaccggaatcggcgtcgcatcgccatccaacaattcaaggcgcggcgcggcatcaaaatggttagcttcccgctcattctccaggcgaggcaggcgaaaattgacctggttgatgagctgggtattaaaactgaccaccagcggtggggagatatacagccgttcttcactattggaaagatgaatcgtcttctcaacgcgaaacactaactgatgcggtccattatccagttcaatgctgtccgcaccgcgcagcagagagctggaaaccttcttgccgtcgagtaccagaagatcgacatcggttgaaagccgcagcgtggtggcaaaaacggataccggcaaacataatgcaatcaaggtggtcacgatgccggttttcataggtagctcctgtcaaaagaccgcccgaataataatgtgtcaaaatttttctttaatcatacttactaacatatagacatatttcccgcttttgctctcattcattcgtattagctgcatggttggcatgtcggctttgtcgtacactttgttaaacagtctggaggaaataatgaaagaaaccgatattgcaggcattttaacgtccactcacaccattgcgctggtgggggcaagcgacaaacccgatcgtcccagctatcgcgtgatgaaatatctactcgaccaggggtatcacgtcattccggtttcgccaaaagttgccggcaaaacgctgctgggccagaaggggtatggcacgctggcagacgttccggaaaaagtcgatatggtcgatgttttccgtaattcagaagcggcgtggggcgtggcacaggaagctattgccattggcgcgaaaaccctctggatgcaactgggggtgattaatgagcaagcggcagtactggcacgggatgccgggttaaatgtggtgatggatcgctgcccggctattgagatccctcgcctgggcctggccaaataaaaaatccccggaaggcaaaaaccttccggggatttgttcagggattagttacgcagacgcggggcctggagttgtttgcggatggtctgcgccagctcatccatggatggctgttcaggatgttcatcctgcaattcgctacttagctgggcttcagccaggtaggtatgaaccggtaggccgttatcgtcctccatcactacgtgataccacggagcggcgcgaagctcgtcattcaccgccagctcatcaggcgacggttcagagagcgaataaaccgggtcgatatccacgaccactccgagataacctaacagggaatggcggacctgctggccgataccgaatttgctggcaatcatagtcacctcccgggaaatctttacctttgatataagggtaaaattccacatttcaagttacatgacgcgacaggcaaaccctttcagatatagcccttccggataggtagcgatcaccggatgatcggctgcctgacggaactgctctataaattgtacatcacgaccggcatcaattgcggcatccgcgatgattttctgaaataaatcgctggtcatcagaccggaacaggagaaagtcaggagaataccgccttcattcagcagctgaatcgccagcatgttgatgtctttataaccacgacacgcgcccatcaactggcttttattctcaacaaacttcggcgggtccatcacgataacgtcaaatttttcaccgcgatcgcgataagtacgcagcaatttaaagacatcatcacggacaaactcagccttgctcagatccagtttgttcagctcaacgttctgccgtgcaatatccagcgcttcctgggaggtatcaacgctgacaacctggctgcaaccgcccatcagtgccgatacggcgaaaccaccggtataggagaaacagttcagcacacgtttattttcaacgtagcggcgggtagccaggcggctatcacgctggtccaggtagtagcccgttttgtgtccgtgctgaatatccaccagcagtttcattccgtgttcttcaatcggcagcagggcaggtggcaactcgccggtgacggggccctgggtcagctccattccttcttttttacgtaccgcgacgtcgctgcgatcgtaaatcgaacattccgggtacagcgtttgcagggcactaattaatgccgcgcgctgatattctgccccagcactcagcagttgcagcaccagaaaattaccgaaacgatcgatagtaatacccggcaggccatcagattctccggcgattaaacgatagctgtcgaggccatctttttgcgccagccagtcacgccatttttgtgcttgttgcaaacggcgggaaaaaaaagcaatgtcgatagactcagacgggtcaaacgtccagacgcgcgcccggatttgcgaagctggcgaataagcgccgcgtgctaaccattttccctgatgatcaacaatatcgatggtttcaccgaggctggctttaccttccatgcgggcaacggccccggaaaagacccacggatggcgacgaagtaatgatttttcgcgccctttggctaacactaaacgtacactcataatttacttttctgtcgatgcaaagaaatgggcgtcattgtccggagttttccatggatttgcaacgcgtccattaaggataaggagagcagcaatgtcgaaagtctgcataattgcctgggtttacgggcgagttcagggcgtaggatttcgctacaccacacagtacgaagcgaaaagactgggtttaaccgggtacgccaaaaatcttgacgatggcagcgtggaagtggttgcttgcggtgaagaagggcaggtggaaaaattaatgcagtggttaaagagtggcggcccgcgttctgcgcgtgtagaacgggtgctcagcgagccgcatcatccctcgggggaattaaccgattttcgtatccgttaaatacattttaccggttttggcaggccagcaattttggtggcttgcttagccggacctttcggaaacagtcggtataaatagcggctgttacctttttcttcgccaaatttattcgccatcgcttttaccagcatacgaatcgccggagaagtattgaattccagatagaaatcacgcacaaaacgcaccacttcccagtgttccggtgacagcgaaatcccttcgttctctgcaatcaccacagccagcggctcactccactggctgctttctttgagatagccttcggtatccgtttctatctctttaccttcgaagatcagcataattattactaccttaatcagactggcggcagtgtaacaaaaaacaaagccccgcataaagcgaggctatgaaagtgttagcgggtgagattaatcgcggctagcgaagcccagaatgctcagcaggctgacgaagatgttgtacagcgaaacatacaggctaaccgtggcacgaatatagttcgtctcaccgccatgaatgatgttgctggtttcaaacaagatagcgccagaggagatcagaatgaagaccgcgctgatcgccagatgcagagcaggcagctgcaggaagatattcgcaaccataccaatcagcaccaccacaatacccgccatcagcataccgccgaggaacgacatatctttgcgggtggtcagcacatatgcagagcagcagaagaacactaacgccgttccgcccagtgccatagcgattacgtcacccattccggcagacagataggtgttcagaataggtccgaggatataacccagaaaaccggtaaaggcgaatgcggagataatcccggtcggcttattcgccgttttataggtcaggaacatcaaaccatacatacccaccagcgtcagaatcagacccggagatggcagcatcagcaccgtactggcagttgcggtaatcgccgaaaaggccagcgtcaggctcagcagaaaataggtattacgcagcaccttatgggtgctaagcagtgatgtacggtcatgtgaagaactaacaatacgatccattgagtcactctctatgacagatgtaattaattaagcagcataatgataatgcgtaagggcacccagaagttttacccatctttacgcatttgatctggaacaggtttaacagcggattatcaggtcattaagcaaatataacgccctgagaatttcgacaggcaaaagaaaaaggggttagcatttagctaaccccttatcttatttggcggaagcgcagagattcgaactctggaaccctttcgggtcgccggttttcaagaccgaagaaaaataaagaaaaatcagtacaatacgcaaagtagctgaaaagttaatcagacttaacaccaagaaaaatcaagatattagggagctattcagagttaatataccaagtctttttgccagaaaattttctggattgcctacttactgaccacaagcggcaaatccagtgttggggtgattttggttttacgatcgtaaatcaacacctgattttctgttttgtgtccactgaaaatttgtttgtcgcgactgctgccttcgtaatctgaaatccctttggcttttatgtcatggaagttgcacccaaacggaacgccggctttttgctcggccgcacgtttagcctgattccaccagttgttcagcgtcttggctattaccttcccgcctttggttgtgttgatcacatactcgcatgtgccggaagatacatttcgggctaactggatcgccgtacgtaatcgcggagaccattccttgatttgtttagtgccggtcttgttttgctcaatgtaaatccctttatccataatatcctgccatttcagctcgagtacatcaccgagccttgccgcacaaagataggatatctccattgcaatacgtaactgtggaattgcttccgcatatattgcagcatactgttcatcggtgatgtaaacagtacgggctttaagtgtgaattttctgactcctttgcatggattatttttcacatacccacgctcatatccccatccgtatacacggctcagacttgccagttcatggtttgcctgggtcttgctctcaagtcctcgcttatccatgaaaattcttacctgttcaatttttacattatcagcaagcacttttccgaatactgccaacaatgccctttgatgttgccgataatctttttgggttcggggggccagttctgtaaatgcaggggagtccataaacatgtgccataatttagctactgtcattatgttgtggagttttgctttttccagctcataattttgccagactttagctacgctggtttcccgcactcttccgagccctatagttcttgtgcttccttcgggtttccatacgtaactgtaaccattcgatctaacacgcggtggtagtgcattatcttttttgttttttcttggtcttcccattgttcagcgcctcaaaatcgggttcagcggaaaccagttcaggtgcttttggcatcgtagtcagtccgtgtggaatatccctgcgaagaactattggttcgtttttaggaccgattacaaatgggataccgtgcagccttaactggtgttgctgttttgtgtatcgctcgtatttcgtgatctcttgaatctctgctggcgatagagttaattcgtacatgtggtcacgtgccttacagcatgaccgccgccaatataattcggagacggcgatcaggggtgaacattaaaaatcaaccggattcgggatcagtttttgtatcgtggctgtaacgtattttgcctggtgacgggcatcatccagcgcattgtggcgcacgccttcaaatggaataactgttctggcatcaaagtcgattgtttttcccagctcaacgattgtgcgtacatcgcgatcgttgtagtagcgccacgggcaggggatgtccagacgttcgtatgaggtgcgcaaaattgcgttatcgaaagttgcaccattaccccatacctgaacgaatttttcatctgagtattcgttgatgaactcccgaaaccgcgaaagggcatccttcagttttacctggtctgttaaaatggcagctctggcttcactggactgcttcagccaccattcgatggttccaccgtcaggaacagcccctgtattcattgcgtcagtcagactgataacgatataaaatactggcccgatttcccctgtttgtgggtcgaagaaaaccgcaccaataaccacgatgggcgcattggtgttggttcccattgtttcaaggtcgatcatcaggtggtaccacactctgctggtggatgtgataacgtgatgaccgttcaccgcaattaagggatctgccgtctcgccagtttcattatcgctggcgtggtcctgagcgctgccagcattctccttgtgtggatgttcagcgccttccatttcctccggatcattttcctgaacttcaacctgattctcttcatcgaatgtttcctggtatgttgcgtcgcccatcaccgcaccacaatcagggcagttgccgccgccggtctgaccgcaggcggtgcagactttttccgcttcctgttgcgctactggctcaggttgtttcgtttctggctcgttttgtaacgcatttgggctgttttgttccgctttctggtcgttctgttccgtttcttgctggttctgattcactgaatcgcgggtttcaatccccttcacccatttcggatcattcgggtcgctaatccctgcaacaaattcaccacgtgatacagcaagcaactgattggcgtcaggctggctgatattggctgcctgcataattttgtttacttcgtcagcggtaacttttaccggctccggttgtgcggtcgtgtcagatgcaccagtattttgttgtgaacctgagtatgtgccgtttttgcgggcaaaatattcttctttcgtgatttcagtagcccctgcagccagcgccttattcagaccagaaagtttgtttgcacgaccatatttttcgccatccttatcggtgaaaaggaagtagaacggcccctcacgctctacagatggttcagtttccagcgtgctttcatttttttgggtatcagatacttcagtttccactgcatcagtttgtgctgctgacggctggagaatatcagtagtgttctggtctgtttcttcatcctcaaacacgccctttgtcaccaggtattcagtgatgtatttgttcagtgccacgggatctttgtgaatgtcgatcggacgctcacggacaaggccaaaaatagtctgacggtcgtagcgaacggcatcgggttgtttgcgcattgatgcggaaatgcgcttccagtcttcgcgatctttgtcgataacttcattttttgcccagcgatggatgctgccgtcaatgtttccggcattaatatcgccaggccacagagcgtaggccagttcttcatccagcgttttccatgtctgcttgtattcgcgacgaatggcggcagtggcggggttgatttttcctgctgagttttcagtgtgctgccggttgactctggcgcgggcaagatcaacaacagacgtgtatttcccggtttctttgcgttcggcttcgcgacgttttttccaggtgcgtaattctgtctggatctcaggccattttgcgcccggcttacatttatgtttaacccacccgatggcgaacagctttagttctgaatacatgacgttaacttcaggcattttcatcagtgcctcaacgatatgcccgtcgaatgttgccatgtcctcctgcaacaattcctgtgcactaatcaccatatcaacggtgatgttttcacatgtaccgaacttaaccaggaccgcgttctgtacttcaagggacagcttgtcaaaattgacgttcatcggatcggattctggttcgaccggaacaaaggaagcgccttcctcatcccagcggttttccagcatatattcggtatcccaggagtcgatggcagggcggggcatgccgggtttatcctcgcagacaagaaatttataagcgcagtcctgagcagccggatattgctccaggaattgccaggtaaatttggcacgggcgcggcgttcgtcgccggcttcaatggcagtggctacagcgactgcaccttcttcctttattgcctgttcgtccggaatggcggcgcaaataaagactttactcattttgttttaacctcattacagatttaagggtgaacaaatccctgccattgctggcatataaaaatgaaaccggatattaattacggtgctgttttaagtcctgccgggatttcgttattgtccatgtgaataactttatcgaccggatagcagttaccgggaattttttgttctgctgcggcagccatgcattctttcattgaaccgtaaatgtcaataaccatgtcaacaggctcgccagtattaagaaaaacagtcagagtgagggcaatagcagtattcattgccagtatcctttttgcatcagacgtaaacgggccagcattgaaacaatgcatattttatttaataactcccgttcgtgttttctcttattaatggcatcttcagtaaatacagggttactgattctgacaccaatttcaaaacaaccttcagacgtattaacgtttggtaataacgtttccattatcgcgtcctcaacaatgaattttgtgatgcggtgcctggtgcctccaggtgacgttaaccagttaataattaacgccggatacagagaacccacccataagaaccaatacggaagtcaactggcctttttaactgttccgcgtgcgctgagccgcattcaccgcatcacaaaattcactttaaaaagggcggacatcagccagcaatgaaactgatgccgccaaaaaggtaatcaacatgggttgttgcagcggggttgtcactcaggcgtatggtcaacctgacaacccggtgccactaatggggcaaggataaccccgccatacttaccgccgcgccatttcgcggagtgccacaaccggaagcgcactgtcgacgaaaatttaacgacaggctatctatgaaccagctacctcgccgtgcgctttcgcgttgtgtgcctgcttttaaccacgtcaggcgaggtggttcctgttattccccaacaacaagaaattcgtataatccggatatccccaacaacgagaagagtactcaacgtgatagcagaactgtcagcagctatggctgcgataaaggagacagctggtctcgctaaggttattaatgacgcaaaaacggatgcagaagttaaagccgcaactattgaacttcagaacaaactaatcacgcttcaggcggaatgcttctctctttgcgatgcgatccgctttcgtgatgaagagataatgcatctcaaagcaaaaattgcagagacagaagattttcagcgacaggcggaaggttacaagcttaacaagcttgattctggaacccttgtatattccaagaagcaatttataggcgatactgagataactgtgcatctttgcccacaatgctttggaaaaaaggtaatatctgtacttcagccaatggaaataatgcgctttgatgctcattttcgtactttttgccccgcttgcaataataagttctggatgaactcaagataattaaccgtttaaataagttgggactatccagatttttaaagaacgtgccggatgctcacccgtgtccggcgcacgcactccacctgacccgtggagaactccttaattaccaaccttagcctcgttggttagctattaacgcgggtatgtaatcattctggcaatgcttaatgccgctgctttttccagcctggtgatatcctgctccagagcggacagattttcagcctgcttagccctggcttcattggcccacttcaggtcctgcgctgccgtaattttctggcgcatccactcataaagttcatcatcggtatagtctggcgcgatgatgacgggttctcgtttctgcatactgattcctctcagtgctgtttccccttaacgccggggtagcggaacaaaaacctgctgcatagttaaagttgaaccctgccgtcatgttcttacgcctcgggctggctacttaacccctgaccactgcctggtaactcgaagtattgccctgcgttctgtggggcggggtgggttggtatgtcgttaaggtaacaagagttacctttcgagtcaatacagtgttgcaaaaggtacattcgagagcataaaaaacccgcaatgaatgcgggttctgactcagtctaagtattgatgtatttgtgaaactttacctttaatggtgtaaccaccattcagttcgatgggtttgtaaagcggattcagtgacaacagatagatgtttggtccgtcaatcgcaactttttttagtgttacgtttggcgttccttccaattggattaagattatttttcccaccagttctctaatgttacttgagcatggtgtgatcagcacggtagatccgtcggggatggttgggaggccgttagagtttgtcatcgcatctccctcaacatgcaataaaaaagagttttcagcggtttttgtcatgacatcaacccaattcttaataccaggaatctcggttactggacaactcatatcccaataaccagcctgttcccacgttaaaacgggcaaccgggcgatgttgtcactaatgtaagggtactgattcagacgcagatcatcggttttatcgtgacagtcctttccataaagaatccattcaggagatttggaaagcaattttgacagtagatgcaaattctcaccgtcaggttttgaagagccattttcccattttgttacggatacacgagatatgccgattgctttcgcaacctgctgttgggttaatccaacgtcttttcgacgattccgaatacgttcgctgatagtgtttttcatgtaaccaatgttactaccaagtgatgttgctatggttgacattgctatgtaactattgttaccatcccgctcgaaataacaggagagttttatgttcaaagatgatgttctgcgctatttcaaaaaaaagcgactagtagctgaggctcttggaatttcacatgtggctgttgtgcggtggaaagcagttattcccaaacttcgcgcaatggaactggatgaaattactaacggtgaattgaaatacaacccagaactttacaagaagcaggatagcacctcgaacgaaggaaagaatgattaatgaaaatcaagcatgaacacatccgcatggcgatgaatgcctgggcgcatccggacggtgaaaaagttccggcagctgaaataacccaggcttattttgagcttggtatgacgttcccggagctatatgacgacaggcatccggaagccctggctcgcaatactcagaaaattttccgctgggtggagaaagacacccctgatgcggttaaaaaaattcaggcgctgttaccggcgatcgaaaaggcaatgccacctctgctggtggcccgaatgcgcagccacagttcagcctattttcgggagctggtggagatgcgggaacgactggtgagagacgctgatgattttgtcgcagtggcgatcgctggtttcaatcagatgaatcgtggtggtccggcgggaaatgccgtggtgatgcactaaaagcacggtgttcggagttttttatgagcagcaagcttcatggtcttgtctgggaaggtgtgccttcaccggcatgatcttatccagggtggcagtaatggctcgccttgcagattacagcaatgacgagggcgtgtcatggcctgccattgaaactatccggcgtcagatcggtgcaagaagtgaatccacagtgaaatcggctattgcagaactggcgaaagagggctggctgacgaaggaagagcgtaaggtcggtgggcgtaatgtaagcaatatctatcggcttaatgtggaaaaactcgaagcagctgctgcggcggcgcgtgagtcatataaaccgaaaagaaaaattagcccggcaaaaaatgacccgttaacagttgacccgtcaaatattgacccctcaacggttgacccgtcaaattttgatggatcaactgttgataaaaaactgccgattaggggggcgatgattgaccccgatccgtcagtattaaaacctgatccgtcagataaaagatcttcttgtccggacgcttcgcaaccggacccgcagacggctgaacaggattttttaacccgacaccctgacgcggttgtgttcagtgcgaaaaaacgccagtggggcagccaggaggatttagcgtgtgcgcagtggatctggggacgaatcgtgagtctttacgagcaggctgccagcgatgatggcgaaatcatgcgaccgaaagaacccaactggactgcatgggccaatgatgtgcgcacaatgcggatgctggatggcagaactcacagacaaatttgcgaaatgtttggtcgggtacagcgggatccattctgggtaaaaaacgtcatgagcccgtcaaagcttcgcgaaaaatgggatgagctggttattcgtctggggcgttcgcctgtacagcgttgcgtgaatcacatttctgaaccggacaccgaaattccgccgggattcagggggtaagtgttgatttgaggttatgaagttattttctcaggagagtttatgggggctatttataccgaagaacagcgggaaagattacagcgtcacatcgttgaccttgtacgtaaaaacgggcgtatgacaatgccacaactggcatcgacaacatatgcttcacatgattccattcgccggtacctgaagatgctggtgagccagggcgaagtgtatgttgtcagcggaaaaggggtattcctttcagagggagtttaccgtgaatggctggcaagttcggcaagaaaagcaagggttatccgcaaaaccagcacaaaaaacagggtaaagccggagcacaaccgtaaccgtctcatttaaaccgtctttcgcctccctttcctgtttccgatactaatgtccattttcgcagtaaaagggacatttaagatgaatgcacgaaaagcggtactggcagacaatccggaattgatcctgcgtgtgctacagctgagatttgacgagtcactgtcgtacccgcgcatttctgcgcagactggtgtcagcaaaaccgccattttttctctggtgaggcgatttcaccaggtattcactgactggcctctttccggtgaatattcctgcgggcaactggcccgggctcttttcccggggcgatacccttcagccccgaccgtgactcagcctgtgaaagcagagaaaccccgccggaaccgattttcaccggagtttaaatggagactggttcagcaaactcttttacccggtgcctgtgtcgcacaaatagctcgagagaatggaattaacgataacctgctctttaactggcggcatctctggcgtaacggtggcctgcaaccgcccggcgaacatgaaacatcgctacttcccgtgacgttaactccggagccggataataaaatcccggcaccagtgcagatacctgaacagataaatacactgccagacagtctgtgctgcgagctggttctgccggccggaactctcaggctgaaaggtgaactgacaccggcgttattacagacacttatccgcgaaatgaaagggagcagccactgatgatatctctccctgccggttcgcgtatctggctggttgccggtatcaccgatatgcgaaatggctttaacggcctggcctcaaaagttcagaacgtcttgaaggatgacccgttctccgggcatctgttcatcttccgcgaacgccggggtgaccagataaaagtgctgtgggctgacagtgacggactgtgcctcttcaccaaacgcctggagcggggccgcttcgtctggccggtcacccgcgatggaaaggttcaccttactccggctcagttgtccatgcttctcgaaggcatcgactggaagcacccgaaacgaacggaacgcgctggcatccgcatataacccgttgtaaagtgaggatatggacacctcacttgctcatgagaatgcccgcctgcgggcactgttgcagacgcaacaggacaccatccgccagatggcgaaatacaaccgcctgctctcacagcgggtggcggcttatgcttccgaaatcaaccggctgaaggcgctggttgcgaaactgcagcgcatgcagttcggtaaaagctcagaaaaacttcgcgctaaaaccgaacggcagatacaggaagcacaggagcgaatcagcgcacttcaggaagaaatggcggaaacgctgggtgagcaatatgacccggtactgccatccgccctgcgccagtcttcagcccgtaaaccgttaccggcctcacttccccgtgaaacccgggtcatccggccggaagaggaatgctgcccggcctgtggtggtgaccttagtcctctggggtgtgatgtgtcagagcaactggagcttatcagcagcgcctttaaggttatcgaaacacaacgtccgaaactggcctgttgtcggtgcgaccatatcgtgcaggcaacagtaccttcaaaacccattgcacgcagttatgccggagcggggcttctggcccatgttgttaccgggaaatatgcagaccatctgccgttataccgccagtcagaaatataccgtcgccagggcgtggagctgagccgcgccacgctggggcgctggacaggtgccgttgctgaactgctggagccgctgtatgacgtcctgcgccagtatgtgctgatgcccggtaaagtccatgctgatgatatccccgtcccggtccaggagccgggcagcggtaaaacccggaccgcccggctgtgggtctacgtccgtgatgaccgtaacgccggttcggaaatgcccccggcggtctggttcgcgtactcaccggaccggaaaggtatccatccacaaaatcatctggccggttacagcggtgtgcttcaggccgatgcttacggtggttaccgggtggtatacgaatccggcagaataacggaagccgcgtgtatggctcatgcccggagaaaaatccacgatgtgcatgcaagagtgcccaccgacatcaccacggaagccctgcagcgtatcggtgaactgtatgccatagaggcagaagtccggggatgtacagcagaacagcgtctggcggcaagaaaagccagagctgcgccactgatgcagacactgtatgactggatacagactcagatgaaaacactgtcgcgtcactcggatacggcaaaagcgttcgcatacctgctgaaacagtgggaggccctgaacgtgtactgcagtaatggctgggtggaaatcgacaacaacatcgcagagaacgccttacggggagtggccgtaggccggaaaaactggctcttcgcgggttccgacagcggtggcgaacatgcggcggtgttgtactcgctgatcggcacatgccgtctgaacaatgtggaaccagaaaaatggctgcgttacgtcattgagcatatccaggattggccggcaaaccgggtacgcgatctgttgccctggaaagttgatctgacctctcagtaaatatcaatacggttctggcgagccgcttacgcacaaccctacgaccgacaccagaacataatttgccgtgagtgccgtcagagtgaggttatgcagcgtgtactggcgttctatcagggagattttcaggaggtgatggagtgagggtaagggtttatatcgccggtccaatgaccgggtataaaaatttcaaccgtgaggcgttccacaatgcggaagaggaactgaaacgggaagggcatacagtcttaaacccggcagtacttccggacgggctgacacagccacactacatggatatttgcatggcaatgattcgttgtgtggatgcgatttacatgctgaaaggctggcagcggtcagcaggtgctaaggcagaattggcactggcggagaagctggggcatgcagttattttccaggaggcaaacagtgaataaccaatggcgaccagatatttgccctataaccggacgtgcatttttcatgtggattgagcatccgaaattgggcaatgtgccgacgtatggcggcccattagacagttacaccattccaacaagggacagcgatggtgagttttcgtgtgagcgttacgatcatgatttcggtggctgggtagaaagcgaatgtcttgggttatatctgattgatgataaagaacaatgcagagtctacgaactcgaggaacgcattaaagagctggaagcgcgggaagttcatttgccgactcgctacggccttcgatatggacatccgataaatgatgatgagcgctacgtcatgatacctaaagaaaatggctgctggctttatctggctgacttagaacatgaactacgtattgctggcattcatatcaaaggagaggagtatggaaataaaaccagaagatgagttaagtaatattgttttatttccggcaaaagaggatgacccacgtaatcaggttaattttctttatgagccatcggaaagaccatattgccatcacgcctctgtccgggttgacgaaaaagagcgtcaggtccgctgtaaaatctgcggtgcagttgtggagtcgtttgactggatgctctctgtggcgaaaagagaaaccagactggcagatgatgtaaggctattgcgccaggaggaacaggaaagacggaaaaatatagaaaagttaattcagattgagcgtaacgcgaaagcgcggatacgcagggcgacaaaatccagaactgaataattaaatttagctctgttaaaaatttaatccttaaccggagggatttctgcaccctcagaacatcaggaggccgcccgaaagggcggtagttaaatgcgaaagtttaaaataattattgaaacgggaatagccggtggagatttcgaggatgaattcgaagtggatgatgatgcgacgcctgatgaaatacatgacgaagcaaaagatattttctttaactactgcagttactcatatcacgaaataaaagacgaagaggaagaacaaaatggctgattttggttcaactaaatacaacgtcagttttgaagaatgacatgaactgttaatggactatgcagagttacgtggtggcagtgctgctgatgctgaagcatggcgtgatgattatgaagcaggaaaaactccggtcgaagcatattgtgatgagtggggcgatgaatgagcgaggttaattatcaggaagggcatgaaacggcggggcaagcaaaaacagtggcatggcgatatcgctacgtgaaaaaaaaggcgttacggactttcaggggaagtagtggtctggtgactggaaatatgtaccgaaaaaagaggattgtaacgacaggccgaactatgaaattcaggccttattcactgccccgtcagtcccggttacatcagaagaactggttaaagctgtgcacttttatgaacaactaaaacgcgaaaatccaccagcatccggaaacctgattacagattcccagataaggcaatgagctacctggcgcagaacgggctgataagtatggggaatgttttacgatgaatatttagactaaagagtttgtaacgctatgtaagtgattttttctggtttagatatttatatgtccggccaaattgaggtgtgtttaaatgtaattgcacattgattgtaggaggaataatgaaaaacgcattgcagtttttgtttgttgcgttctggttgttcgtatcatgtatgcccatcatcttcacagcaaggtatatggaaaaagttgatgttttgatattaatatttggatatataaatgccctttttttaggggtgttcatggcggtcatgtgcattgaatactggcggtaaatacagcgaacgccattggtttagttggatatttactgtgccggacaaaaacggtttgcggggaaatcttagttaagtagaatgactgcgggtgcttgaggctatctgtctcaggcatgaacaccaaaaggcagatagagaaaagccccagttaacattacgcgtcctgcaagacgcttaacattaatctgaggctcaatctatgaacggcaaatctaggttagcctcttacgtgccgaaaggcaaggagaagcaggctatgaagcagcaaaaggcgatgttaatcgccctgatcgtcatctgtttaaccgtcatagtgacggcactggtaacgaggaaagacctctgtgaggtacgaatccgaaccggccagacggaggttgctgtcttcgtggactacgaatctgagaagtaagagtgaccaggcgggagagtaatctcccgccacctctgatgtgtcggcatcctcaacgcacccgcgcttaacccgcttcggcgggttttttgttttacgtattctggtttacaatccacaggccagcctgaacaactggcacctgctgcgccagcagagaaaaccgatggcgcacaataccaaacatcacaattctgataccgaccttgccagcaggcacgggcggcgttctcatacattcaaatatgactggtatcagcatgacccctgcactgaagaacaggccgaatggctgattcagaactaccgcagacgtggttacgagtttcagaaagacctcagcctcgacttccgacactggatcatctcagtcagactgccttactctgaacgcccaccgcgtccgtcccgcacattccagcaacggatctggaggtaacgtgcgggtattgcttcgacctgttccggtaccggaactcgggctggtggtccttaagcctggtcgtgaatccatgcaggtatttcataaccctcgagtgctggtggagccggaaccgaaaagcatgcgcggtctgccgtccggagtcgttcctgccattcgccagccgctggcggaagacaaaacattgctgccgtttttcagtaacgaacgggtgattcgtgctgctggcggcgctggtgcactttctgactggctgttgcgtcatgtcaaatcctgccagtggcctcatggcgactatcaccacagcgaaaccgtcatacatcgttacggtaccggcgcgatggtgttgtgctggcactgcgacaaccagctgcgtgaccagacttccgaatcactcgggcaacttgctcatcaaaacctgtcagcatggatgactgacgtcatccgtcacgcaatgaatggcacacaggagcgggaattatcgctggctgaattatcctggtgggcgctctgcaatcaggtagcggacgcattaccggaggcagtattacgtcgttcgctgggattgcgtgcggataaaatcctctcagtgtaccgcgacagcgacatcgtacctggagagcagacagccaccagcatactgaagcagcgcacaaaaaatcttacgccggtgcctcacgcccaccagcaaaacccgccacaggaaaagacggtggtcagcattgccgttgatccggagtctcctgaatctttcatgaggcgacctaaacgtcgccgctggatgaatgagaaatacacgcgctgggtgaagacacagccgtgtgcgtgttgtggtaagccagccgacgatccccatcacctgattggtcatggtcagggtggaatgggaacaaaagcccacgatattttcacgttaccgctgtgccgggagcatcacaatgaacttcatgcggatccgctggcgttcgaagaaaagcatggttcccaggttgatttaatttttcgttttcttgatcacgcctttgcaaccggcgtgctcgggtaaaagaggttactgatgcgtatagagtttgttttgccttacccgccgacggtgaacacctactggcgacgtcgtggcagtacatattttgtatcaaaagccggtgagcgttatcgccgtgatgtggcgctcattgttcgccagcagcgactgagattaaacctgtccggaaggctggcaataaaaattactgcagagccaccggataagcgccgccgtgacctggacaatattctgaaagcaccactggatgcgttgacgcatgcggggttgcttatcgacgacgagcagtttgatgaaatcaatattgtgcgcggtcaggtcgttcctggtggtcggttgggcgtgaagatttacaaaattgaaagtgagtgagcgtaaatatgatatacccggaaattacaggcaaaagcggtgagcatttacgcctgaaaacgctggaaagtgtctggctccaggggaaactgcgtatgtgggggcgttggtcgtatataggtggtggcaaaacaggaaatatgttcaatcagttgctgacatccaaaaaactgacaaaaaccgcgatcaatgaagccatgcgcaaaatcagagaatcagggattgataaacctgaactggaagcattcttgcgagagatgatcgctggcagacagaagagctggctgtctcactgtactgatgcagaggcgttacgcattgatggggtgataagtaaagcgctcgcaagttatcctggattgattgatatcctgcggcaacggtacgaagggcgggggatgagtaaacgaaaaatggctgaattgttgaatgagattcaccctgagtggtgctatgcaacatgccgcaatcgtatagatatgtggttgagaatagctgagtttattctatatccactgatgcgagatgcattttcttttactgacgcttagagtctggagggcgtttgttgttgcacgaagaggatttctggttggtggcaaggcttatgcagttttaaaaaaaagcttgtatttttagccataaactgtttcaatccagctacgcttcgcaaagctgtaccgcgaggcgaatagcagacatggacatttgaaagagcccgctttttgcgggttttttttatgcctgaaaaacggtacaggacgttaaacgcgctgatggttgcgaataccggtctttcagcttgctggctttttcgacaagagctattggtatgtcacgttaaccagaaaaggaaaaagacatgctaaaacagcaggatatgaccgaaaccgccagagtggtgtttaatgaattaagcgtcaccgaaccggcgaccgtcggggaaattgcgcagaatacttacctttcacgcgaacgctgccagttaatactgacccagcttgttatggcgggtctggcagattatcagttcggttgttacagacgccttccgcagtgaaggctttttaatttgtggtaatgggcggctggtgggtgttagcggcacctgccagccatttgctcatgcgttggggtcacaagcaaacctcaggcccatctgctttgcgcaaaagcggtatgagcctatcagagaagtgcttattgatctatggctaatactgtaaaaatatccagttgtgagttaatcaacgctgattgcctggaatttatccagaccttaccggaaaactctgtcgatctgatagtcacagacccgccatactttaaagtgaagcccgagggctgggataatcagtggaagggtgacgatgattacctgaaatggctggaccagtgtctggcgcagttctggcgtgtactgaagcctgccggaagtctttacctgttctgtggtcatcgcctggcatctgataccgaaataatgatgcgtgaacgctttaatgtgctgaaccatattatctgggcgaagccgtccggacgctggaatggctgcaacaaggaaagcctgcgggcgtatttcccggcaacagagcgcattctgtttgccgaacattattaggggccatatcagcccaaacatgacggctgtgcggcaaaggggcgcgagcttaaacagcacgtcatggccccgctgatttcttactttcgtgatgcgcgtgattcactgggggtaacatcgaaacagatagcggaagccaccggaaagaaaaacatggcgtcacactggtttggtaccagtcagtggcagttgccgaacgagggtgattacaacaaattgcaggcgttgtttgcgcgtgttgcggcagaaaaacatcagcgcggggaactggaaaagtcacaccatcagctggtcagtacatacagtgaactgaaccggcaatatgccagcctgctggaagagtacaaatccctgcggcgttatttttccgtatcggcagctgttccttatacggatgtctggacgcataaacctgtacagttttatccgggcaaacatccctgtgaaaaaccggcgggtatgttgcggcagataattgaggccagcagtcgtccgggtgatttggttgctgatttttttatggggtcggggtcaacaataaaagcagcattatcgctgggaaggcgtgcggttggcgtggaactggaagaagagagatttaatcagactgtaactgaaataaaaaataatcgttaaatgtgtatttggtaatttctttatttcagaaaaaataaaaacatatgcatatatttacaaatccgggattattttcggattattttggttgaagtaatttttttgcccgttattatgcgcaacggttctgaggggaactcctgttcatcggtgatatcgctctcccgaagaaccattgccgacttagctcagcaggcagagcaactgacttgtaatcagtaggtcaccagttcgattccggtagtcggcaccatatgcgggtatcgtataatggctattacctcagccttccaagctgatgatgcgggttcgattcccgctacccgctccatagtagtaaggcgagattgtgttatgcactgacacattatatatgtggggatggtttttggcctctttatccacgtcccgttctgtaatgagtgataccaattgcagtccagtgccattttttacgccaccggaatggtgcattattggtagagatttgcaatgtctctggcaggggccggtgatgcatcatcccgatgttgtaagcatcacgttgaaatcaatcaaacccaggaaatacatctttaaccgccgcgccaggcggtttttttattcttaattcgaaaaaagaaaacacggacattgataatgtccgtgtggcaatgccatgtaagtcagtgatgaatatggcgcaaaaaaagcgcggttgtcggattaaagccgcgggacaaaatccgtgaagaagaataagcatcggtctcctccaggagacgagttgatattactaagctttaaaaatggtttaaatccccgtattaaccttaatttcagataagctttatttcatttcttcgcgccacgcccggcgcacatcaaaaaccacagagcctttcaggggtgagcttacgggatggtcagtgtgactttctctgtgggctggtcacccccgggcggaggctcacccactaaaaggaaaagtcacgatgtttggtattttcaaaaagaaaacccgcaaggccattaccgaagtgaagaagatggagaaccgcgacgcagtggaggcgaccgtctggggcgcgtattccatagcattcgccgacggcacctgtgatgcgaaagaaatcgcggtactggagaaaaccattgcagcactccctgcctttgcgccgttctccggtgagattgcacaaatgagcgccaatattcgcgcccgttatgaagcgtcgccgcgtagcgcgaatgctcatgcattgcgtgaactggctgacgtggcaggtacagacgacgcggtgaatgtgctgtgcctgtgcctggatattgctgatcaggatggtattggtccggatgaagaagtgcagctcaagaaaattgctcaggcactgcagttaccactggagcagtacctgtgaaaggtgcgcgccttgttctggctgccatcctgctgtttctggttgtggtggtggattttaccggacggctgatgtcggtgctggcagatggtgtgctggtggcgatggcgctggtcgtgctccggcctttactgcgcaaatctgaatagcaccacacaaaaggcatctgcgggtgcctttgacggggtgttttttacgggccgctggtggcccttttttatttacaggagaaaaaagtatgtctgaacccttatccggttccggcacggctgcggcgctcggcggggcgacggtattcgggctgtttaccggaacggatttcgggattgtgtttggtgcgttcgccggggcgttatttgtggcaacgatgccgcaggcgctttcagcctggcgtgtggcggcgcattttctggtgtcgttcattatcggcgtactgggcgcagaggttcttgcatcctggctggtaaagcatacagagtttgacggtgcacctgtcgacgcattgtgtgcagtactggtgtcagtggtgtcggtgaagattctctcgttcatccaccagcaggatattgcatcactggtgtccggcctgttctcccgtctgcggggtggaggtggcggcaatgttaagtaacattcccggattgctgaatgtagcgttatgcacggttatcgtgctgacgctctttttttatcgtcgccgtgattccagacataaaccgctgatgtcatggctggcctggctgctgatgctgctgtatgcctttgcgcccctcagctatctgtgtggtcgcccgttagcaacgggctggctggaagtgttttttaacctgctgttctgcgtgctggtgatacgcgcacgcgggaacgtcacaaaaatctttccattgttgaggtgaatatgtcgggtaaattcagattcagccgtcgcagtgaaaaaaatctggagggtgtcaaaccacagctggttgctgtcgttcgccgtgcgctggagctgacggaggttgatttcggtattacggaagggctgcgcacgaaagaacgccagaaacagctggtcgcggaagggaaaagccagaccatgaacagccgccacctgaccggtgatgcggtggatgttgttgcctgggttgacagccaggtgtcatgggactggcctctgtacgagaaaatcgcgcaggcatttaagcaggctgccgcagagctgggaactgccatcgaatggggcggggactggaaaacactgaaagacggacctcactttcagttgaaacgctgataaccaggtgtgttatgagcagaaaacactggacacacagaataccgcgagtggcggcgaaatgggcactggtagcgatactggtgccttttttattggcgggatgcgtcagcctggataaggcgcgccagcttttcgataccgcgtctcaggtctgtcagcttattgatggcgttcgacggtgtgtgcagaactgatcgtctgtaagagcagaatattttgctgaaaaatgaagggtgcgccaccgcccggtgcggcggcgggattagatatcaggagacgatgatggaaacaacagaaaacaaaccgattgtaattggtgctgatgctgcaccgtttaagtttgaactgtcacaactggtggaagtacgcatcagtgatgaatggggtgaggttaaagctcgcgctcagtatgcagatggcgaaaaccagtacttgctccactacaaagctgctgatggtcgtgccacaacggagtggtttggtgagtcaatgctggaagcaacagaagatgatcgccatccgggctgtccggtatttgccggtatgaaattaccggaaggcgcagttgttactgagtaacaggcattacagcagcccttcagtgaggggctgcgataatgccggtattaaggagattccaatgccatcacgaataccccgcgcctgtcgtaagcgtggatgtgcaggcacaacaacagacagttcgggttactgcgataagcatcgcggtgaaggctgggtgcagcaccagcgcggactgagccgccaccagcgtggctatggctcaaaatggacggtgattcgtgcccgtattctgaagcgcgataaaggtctgtgtcagttgtgtctgcgtatcggtgtggtgagcgaggcgaaaaccgtcgaccacatcatcccgaaagcgcatggcggaacagacgcagacagcaacctgcagagtctgtgctggccctgccacaaagcgaaaacagcgcgcgaacgaatcaggtgataattattctcacttgtggggaggggcgggtcaaatccctgcaaccctggctgtccgggaccgcccgccaacccttcttcgcatcgccgcaggttcgaaaactttttttgggaatgcgatcaaacgattgataggtaaaaccgattatgtcaggacccccgaaaaccccgccacgcctgcatttgatacgaggcaacccctcaaagcgccccgttaaagacccaaaaaaagccgctaaaaaggatgaaaaaggtctccctaaaattccgcaacatttaggggcgcaggggaagtactggttcaggcgaatggcggaagaactgaatgcggaagggatcatttctcagcttgatgcgcgtgcactcgagttactggtggaagcctacaccgaataccggcatcactgcgaaacacttgatgctgagggttatacctaccgcacggaaacgcagaacggtgatgtgctgattaaggcacacccggctgctgcgatgaaagcggatgcctggaagcggatccgggcgatgcttgcagagtttggtatgtcaccggcaagccgggcgaaagtaaataccgccggaccggatgatgttgatccgctggcggaacttttaaaagcgagagactgatggcaaaagtggctgacgggatccgctacgccgaacgtgttgttgcaggagaaattgtcgctggcgaatttgtccgtctggcctgccagcgttttcttgatgatctgaagtacggcgaagagcgggggatttatttcagtgaaccccgtgcgcagcacatcctgaatttctacaaatttgtgccccatgtaaaaggggcgctggcaggccagcccattgaactgatggactggcatgtatttatcctcattaatattttggttttgtcattccgctggtcaatgaagagaccggggaagttgtcatacgcagcgatggcagcggacgtccggtgatggtgcgccggttccggacggcgtacaacgaagtcgcccgtaaaaacgcaaaatcaaccctgtcatcgggtatcggcctgtatatgacgggggcagatggtgaaggcggtgctgaggtgtattcagccgcaaccacgcgtgaccaggccagaattgtgtttgaagacgccaaaaatatggtcagaaaagcccggtcgacactcgggcggttgtttgatttcaacaagctggcgatttaccaggagcagagcgcatcaaaatttgaaccgctttcctcggatgcaaacaacctggacggtctgaacatccactgcgccattattgatgagctgcatgctcataaaacccgtgacgtgtgggacgttctggaaacggcaaccggtgcccgtctgcagtctctgttatttggcatcaccacggctggctttaacaaggaagggatttgctacgagcagcgcgattacgccattaaggtattgcgaggctataacagcgacgtggagggcgcggtaaaagacgactcctactttgcgatcatttacacgctcgatgagggagatgatccgtttgatgaaacggtctggcagaaagcgaatcctggcctgggcatctgtaaacgctgggatgatctgcgtcgtctggcgaaaaaagcgaaggagcaggtctctgcgcgggtgaatttttttaccaagaaagtaacatcacgccgtaacaacagtgcgacctgtcctgatttttttagtaaccaaatgaaagaaaaagattttttcttgttcgtcgtttttgttttttctggaaggttctggctgttttcatcatttgtgtattgcactgtgtattgcaaaaacgggttataaatcacatggcgctaaacaaactgagcgataaaaaacttcgttccctgcttggacgcaggagtgagaggcaggaaaccatcgctgatggtaacgggctttcggtacgggtcagtaaatacggatgtgttagttttgttttcttttacagactggcgggaaggggaaccgcgcccatctggctgacacttggaaaatatcctgatctgagtctcaaatcagcgagagagatgcgcgatcagtgtcgaacctggcttgcggagggcagagatccacggattcagataaaaattgaacgggaagccaccttgcaacctgttaccgttcgtgaggcacttgaatactggcttgataattatgcaatggataagcgtaggggagcagaacatatcaggcagtgctttggtaaacatatttatccggtgattggtcatgtaccacttagtgattgctctatatctatgtggattaagtgttttgacaaaataaaaaaagtagcacctgtacaggccggagctttgttgcgtatatcaaaacaggcgcttaaattttgtagggtaagaaaatacgcgattagtcatgaaattgatgatcttgaggtctgtgatgtgggaaaaaagtctgcgcgaagaagcagggttttaacagatgatgaaatcagagatttatggcgaagtattaatactgattatgacaatcacgaattatcatatgaaaaccgaattattttacgtttcctggtagtttttggttgtcgactgtcagaagtattactgtcgtcctgggtagagtgggattttgataagaaattatggcgcgttcccgctgatcatagcaaaaatggcagggaaataatcagaccgattcctgatggcatgtttaactggttagttacgttaaaaaaaataacaggtaacaaagaaaatgtgattgggtttgatatgcgtcagtgtacggcaagcgtaactatcggtaagacatggaaaaggatgaaacactcggagaaatggacggcgcatgatatgcgaagagtgtttgccacaaaactaagtgatcatggttttgaacataatgtggttgaacagttgcttgggcacacattaggcggtgttgccggggtttataacagaagccagtatatggacagaaaaaaagaagctatgaactggtggtacgactatctgaataagcaaattagtggtgacagtaatgattcaaatagttacgcgtgaagaacttgaaaatgatgaaacaatcgacaggatgattaaggaagatgaatgtgcatggttaaccgctcttggcaggagacacagatcgttacttgaaaaggaaggaaaatttccacgaaaaatatgtattggcccacaaacaaaagtctggcgcttatctgaggtgctggaatgggtaaaaggtgaatggaaaccctgagctaaattaaatgagatataatcaacccgtcttttggcgggtttttttataggtgatatttttatgcaaaaatttatttatcctacacccgaagaacgcattcagattctgaaagatcatggcgaaccgtatgatcgccgtatacgcgaacatgagtgtgccaatcgtaccgggctttcaagaagcagacgttgggtacttgaacaggagggagcatttcctgctcgtgctcatttagggaaagtgtctgtttcctggttgctctctgatgtgctctggtgggttatgcatccgccaggagtaaaggaagtaaacagcccatacaaaaacgccaataagtaattaccgacaaccccgcaccacgcaatgcggggttttttgtatgtgaggtaaaaagcaatgaataaaaatattgccgtgacgggcaagggtgacgcacgtcatgtgaaaaaattctgtgatattcgtgatctggtcgttctgcgctttgatggcgtggatgttcgtgtggtgtatctaaacggcgatccgtggtttgttgcaaaggatgtttgtgctgcgctggaactgaccaattcgcgtacggcgttgcagatgcttgatgatgacgaaaagggagtaaatttaacttacacccccggaggaaatcagaatatgagcattatctccgagtcaggtttctacaaactaatagcccgcagccgcaaagcaacgacgcctggcacatttgctcatcgtttcagtaactgggtattcagaaatgtgataccgggtatcagaaaaacgggggcttatggtatcccgtggggcgcattacaggatttttcccgccgcaaagagcaataccagataagtgccagtgagaaggggagggagctacaggcatgtaagcgcaaaaagcgtgagctggaggaagaagaaaaaaggctgatacgtgaataccagcctgagttttactttggtgagcgtattcagtaaccacacgcggtgttgattatacggtacatcgtgttgaccgggaagctacccaccagcaaggcaaaatcttctgctaaaaaatgacatatgaccagtcgtccggaaagcatgaaattttacaaaaatggaaaatgaagatttttattgtgctggtgggtaaaaacaaaaagcgccccgttgccggagcgcccttgcgaacaattaacctactgcgcaaaaaatgaatataagctgtggaattatatcagacaggtgacgaagcgccactattgccggataacaggcaaaacaaaggcgaccgcaaaagggtcgccagtgggaacaagggaaaacaaaagcatcaccaacaatgccacatttgcggctggtgggcaatgtgatcagtcagatttggttcgttccagggtttgcaacgagagctttttcctgcgctctttaaggaatttctcaagagcaaacgaacaaggtgcgaatctttctgattcatgctctatctttctgcgccgtcttttccgtgtcggtgataatgttttggtcaattctttatcggtcattgtgttgtcctgcatagcaatgcgccgtagttactcacaccacggcgctgatagtgattattctgattctttggccttccggcgctgttcatattttaatttgcgtccacaggcatctaagacccatgcggaaaaattagcactaggattagttaatttttcttgttcaacgctggcatcaatcccatctataagctcatgtgggaatcgaatatttttctttgctgatttgttgtttgtgttaccgctagacattgatgcacctcacttaaatggactttatgggcgcacacaatacagcaaaaaaaatgagatgttaagtattgacatgtgcgcacacatgattttaatctgtgcgcacagtttgagttttgtcactcaaattaagcaacgccccgcagtgctcgcaacacatgcagggcgtctaaccaccaacgatagcaagagtatcgaggtagctatgttaaatcataccacacacccgcaagggcgggactcgcacaacctgaataaatatatctggcgttttatcgccctgagtacggcacaaccgcgcgtaattcacatcgaggccaccagcgaacaggaagcacgccagcaatctcctgatggctgtgtgatggtattcgccgcccgtattcgtcagggggtgagccatgcatgatgacagttatttaaaatcaatgagccatgcagaaaacgcactgactaacagtgaatgtttgcggcaaatattgcttatctggcttgatggtttaagtgatgcgccggaagatgaacgtgaatctaatcttgctggtgcgtttatttcattactcgatacggtaatcgtcgaattaaataaagcgatcgaaattcacgataaaaaaataaacgcggaataaaaaccatgaaacagaaaaattctggctttactgccagcggccccgctcggcctgaaatccgccccggcgatattttcaaagataaatacggcggcactgtaacgattaaaagcgtggcgggacggtgtgttacttaccgccgtgatgggtacggctatgactgcgtgatgcctgtttatcagttccggcgtgatttttctctggtacagaacgcaacacgcggtaagcccaccagcagggaaaaagcacgggaaaatattaagaaaataaaaagcatgctcagcgcatccagaggtaaaaaatgaaactggcaccgaacgtaaaactgttaccgaaagataaaggcgaggatgcagtgatttttgcgggggatgacgcatacagccatgcagagcattacatgcagggcggagaagccagaaagcgcggcgacaaaataccacctgtttatctcggacggcgtgacctgggtaatctggaaaacctgcgtattgtggatgatggtcggtcacgcgccatcgtcagacgtgccggaaaactggatgacaaactggcgctacagattgaaaccctgctggcagtggctggtgttaaggaagcctgtttttgtgacgagaacggcgatttactggaggactggacaccacagcttgcccgactgaaagacgaatacgagcgcggggaaagtctggtgttgcccttaaagaaaaaaatcacagaaagccagggcgatgatgaattaaagccccgcgttgaaagccgcgccgatggtgttttctgggtaacgccaaaagtggacaagcagtcaggcgaaattatccggcctgagacgtggttatgttctccgcttgaactactgggaacggggacgatcggtaaagagcattaccgcgtgatgcgctggaaaaagccagcaaaccatgaagtcatcacaatggcgatcccatgtggtggcattggcgaccgtgacggctggcggttgctgaaagaccacggcctgaacgtgacaaccaacggcaaatacagggctatcctggctgactggatgcagttaagcggaaaccatgaggaatggcagttaagcacaacaacgggctggcattttggcgcgtacatcatgccggacggttcggtcattggtgattgcgaaaagccagtcctgtttaccggaaaaacggctgctgttaatggttattccgtggcaggaacggcggagggctggcgcgataccgttgcgcggctggctggtggtaatccgtccatgatgctgggtgtggcggtatcgttatctgcaccattaatcgggctggtgggcgctgacggcttcggggtacatcttttcgaacagtcatcggcagggaaaaccaccacacagaacatcgcatccagtttatggggagagccggacgcgcaacggctgacctggtacggcacagcgttaggtatcgctaacgaggcagagtcgcacaacgacgggctgttacccttggatgaaataggccaggccggaaacgcgcgggaggtgtccacgtcagcctatacgttgtttaacggttccgggaaattacagggggcgaaggacggcggcaaccgggagataaaacactggcgcacggtggcaatcagcaccggagaaatggacgttgagacattcctcaaaacggaggggataaaagtcaaagcggggcagcttgtccgcctgcttaacgttccgatggaaaaagccacgcactttcacgaatacagcaccggaaaggcgcacgcagacgcgttaaaggatgcctggacagaaaatcacggggcagcgggtcgtgagtgggttaaatggctggcaggccaccagcaggaggcaaaggatacggtaagggaatgccgcgaacggtggcgcaacctgataccggagagctacggcgagcaggtccaccgcgtgggtgagcgtttcgccatactggaggccgcgcttgtgctttccggtcatgtaactggctgggccgcgcaggaatgccgggacgcaatacagcataactttaatgcctgggtgaaggagttcggcacgggtaacagggaatttaaacagatggttgaacaggctgaggcgtttttgtcgtcgttcgggttcagtcgataccttccttacccaaacagtgatgaacgtgatttaccgattaaagaccttgccggatacagaaaggggagtatcagaaatgaagatgatgagttccgtttttacacgtttcctcatgtatttgagggtgagatagcacagggatttaatccgtctcactttgcccgcgcgttgagtgctgccggaatgctggaagcgggtaacgatcgccgttacaagaaaaaggcgctcggcaaaattgggggaagcagcatgttttttacgtgctgatgttccagcctgaggcagaagattaaccccctgtgtgaggtgaaaagttgcgggttatgcgggttatcctgtgtataagtgcattaactgtatgaataaaaaggaatcaataacccgcacgtaacccgcaaaacggcagttataacccgcaaaagtgcgattataacccgcagaatttcaccgtaagggtgtaaacaagcgtaacaatcaacgttaaaaccggagaacagacagcatgacagcacagatagcggcttacgggcggctggtggctgacccgcagttaaagaccaccagcaaggggacacaaatggctatggcgagtatggcggttcccctgccgtgcagccaggcagatgacggaacggcgacgatgtggttatccgtcctggcgtttggcagacaggccgatgcactggcaaaacaccagaaaggcgaactggtgagtgtggcgggtaacatgcaggtaagccagtggacaggccagaacggcgaaatgcggcagggctggcaggtcatcgcagacagcgtaatcagtgcgcgaacggcgcgaccgggcggcaaaaaaggccagcagggccaggctactgacgcactgaacagggcaaaacaacagacaggccagcacgatgatccgtacggggacgggataccgttttaagcagtgaggtacagcatgattaaagacagcaaagcggaagaactggaggctaaagggctgtaccggagagcggcggcacgttgggctgatgttatgtggctggtgagcactgacaaggagcgcgaacaggtggcaaagcgtcgcgcggaatgtatccgtaaggcagcgcgccaaccagtcataccggataatttcggaatactgaaagaggccataaaccgcacacataccgggatgggcttacagaaacctggcggtgagatgttcaggaactacccgaaaaaaaaggggataattgataacggttgttaactgtttctggtatcgtggtagcaggaggaaacatgcctgtgacatttgaagaagttcagcaacataaaaagtttcatggttttgatgatctggaaaccacgacagtaaaaaaatatcgccggctgctttcttccgatgcgttattttttgtggatcatcatgattttctgcgtagctcactgaccggggaaattttcgcaaccaaccgtgagcaggtggaagcgatgatcgaatatctgtggaaaataaggcgcagaatgcgtgatcccgtgaaacggtagaataataatggcctggtattttccaggccattatttttagaagtcgatctctgtatcgcgattaaattcatcgctaaggtaaagtgcttcgcttgggcattttccgttttccagtaatgtttcccagaaatctttatcgaaacacccctcaagatacagatagcggcaaatgtgaagtaaatcacttcgtgtccatccgtgcatgctgctacttgttacaccatattcactttctagtttatagaatgtgagcgcctcccggtcgtgccaggctttgcacagacgatcgtatatctttttagctttgtttttagatgtgccgaaaaactcttcgtaaatttcatgtgggcgagtaggaatacttccgtcgccatcctgcaagaaaggataaacatctgcctcccaggcatacacgtaagaatcgctgaactcatcatagtgtttaccaaggtggagaatctgcaatcgttgctgaatgaacattgcttttttcagttcattttctgacatagttcgttcctcctgattgacgagcagaaaatgtacggaacagcttatttattttttcaggttttgtaaattatttgttcgtggttgttccaggttgttcggtgattctggctgatgtttacatactgatttttatgtatatgttggcgtgtggcactcagacgtgagccgccacaatgccgcctgaccccctgcgcgatgccgggttgatctgcgagatgccgagagtgtcgggcggcgctccctccgtgttggtttcacgtcctgaatcttaaccaatacgagaaaaccttcatgaagaaattaatcgaactccgccagcaaaaaaccgccctgaaaaaccagatgcgatccctgctggaaaaagccgacagtgaaaaccgcagcctgaacgatgacgagggcaaacagtttgatgaactgcgtgcaaaagccgattccctcgacacagaaatttcccgcctcgaatctgtggctgatgaagaacgtaaccagcctggtgtttccgtcgaagagaaaataaccaaagacgaactgcgctcttacattctgaccggggaaacccgcaacctgtccggcagtgtcccggctgatggtggttatacggttatcccggaactgaacagagaaattatgcgtcagctttctgatgaatcggtgatgcgtaaaatctgtactgttaaaaccattcacagcaatgaatttaagcaattggtttctgccgggggtgcggtcgttgaacacggcgaagaaggtgcggcacgtaaccagacggcaacaccaaaactgaatgaagtcagtatccgcctgtatccgatctacgcttacccgaaaaccactcaggaaattatcgatttttccgaagtcgatattatgggctggttatcttctgaaattggcgacactttcgttgataccgaagaaacggatctggtttccggtgatggcgagaaaaaagctaaaggtttcctggcttttccgcgcactgcggataacgacaaaacccgtcctttcggtacgctccagacgaaaaaagttactggcagtctcagcgccgacatgctgattgacctgaaatttacgctgcgcaataagtaccgcaaaaaagctgtatgggtgatgaactcaaatacagccgcctccgcacaaaaactgaaaaatgccactggtgattacatctggcgcgatcgtttacaggctggtgatcctgattctctgctggggcttccggttgaatatctggaatttatgccggacggtgtgattgcagtaggtgactttaagcgcggttatttcatcgttgaccatgaaaccggtacgcgtacccgtctggatttcagcgaacctggattcattaacatctatacccagaaatatctgggcggtggtgtggtggattcgaacgccatcaagattctggaaattcaggctggcaagtaatgagcaaagggggcttcggcctcctttttcagctttatggagtacaccgatgcaaaataccgattttgaaatccgtacatctgaactgaccgccagcgataaaaaactggtgggttatgccgttcgctggaacagcctttcagaaattatctgggacgaattccgcgaacagttcacgccgggggcttttgctgactatctggcggcgggtaatgatgtgcgctgcctgtatgagcatgactatacccgactgctggggcgcaccaaatccggaacactggtactgactgaggacaacaccgggctacgttttgaactgacaccgcctgatacccagcttggaaaagatgtgcttacgctggtggagcgtggcgacattacaggaatgagctttggctttcgcgcattatgcgaagagtggaatatcgcgcaaaaaccgtatctgcgcactgttaccgccgcagaactccgtgaaatcacgataacgtcgatgcctgcttatcccgaatccggcgtggagattgcccaccgttcgttgtttgcacagcaccctgaattacgcccgacaggaaataatcgtcatcgctgggctgaactggcggggttgtgatatgtggtggccttttagtcgtaaaaaaagcgatctgcgtaacctgtccattgatgattttctggcgctgtccggcgtaccgaataccggatccggagaatatgtttctgccgggacggctgaatcattgcctgctgtgatgaacgcggtttctgtcatcgctgaggcggtggccacgatgccgtgttatctgtatctggtacgcaatgacaagggcagggaggcgcgggaatggctggacagtcacccggtcgatattctgctgaatgagcagcctaattcgtgccagacaccttaccagtttaaacgcacaatgatgcgtcactgcctgctgaacggtaacgcctatgcggttattgagtgggggcgggacggtcagccaaaatcacttcatccttatgcgccggggtgtgttgtaccggaacgcacaggcgcacacaaataccgctataccatcaccgaaccctatacaggaacggtacgcacgtatttacaggaagaagttctgcatctccgctatgcctcggatgatggctttctggggcgctcccctgtcacgatttgccgtgaggcgctggggcttggccttgctcaacagcgccacggagccagcattatgaaagatggcatgatggcggcagggattatcacgtcaggcgaatggctggacggcgtgaaaggtaaacaggcattagatgctctggaacgctataagggggcgaaaaatgccggaaaaacgccaatccttgaagggggcatggattacaggcaactggggatgagtaaccaggatgcggaatggctggcctcccgtcgcttctccattgaagacattgcccgtatgttcaacgtgtcgccgatttttcttcaggaatacagcaacagcacctacagcaatttcagtgaggcaagccgcgcgtttctgactatgacaatgcgtccgtggctggcgaacttcgaacagcaaatcaaggccgctttgctggtggcttctcccgtacctggtacccgttatctggttgagtttgattcagccgatttactgcgcgccacccctaccgagcgttacgccacgtatgagaaagggattaagaacgggatcatgaatccgaacgaagcccgcgaacgtgaggggatgccgccgcgcgaaggtggcgacgaattcagccaggcatggaagcagacggtggaaattaaaggtgaaaaagatgagtgaagaaaaaattacacctgatgaggtcagggcacatcttcgccttgatgacttttccggagaaggcgaacttctgaaaatgtataccgatgcggcgctggaagcctgccagaagcatatcgggaaacgttttgaagacgggctggaatttaccccggcaatgcgtgttggttgcctgatgtacatcgctttcctgtacgagaacagggaagcagtttcaccagtggagcagtctgaactgcctatggctatttctgcgctctggtcggtttatcgtgatgtgggggtgtactgatgccgtggcaaccattaaggcgatgcactgagccgggctgtaataagcgcgtgaagtccggcaagtgtgaagagcacaggcgggctgcatggcgtgcagaggatgccagacggggacaccgccgcgcgcgcgggtattcccgacagtgggacaaataccgcgccctgtacctgagcaaaaacccgttatgcgtgcgttgtctggctaaggggatttatacgccagctcttgtggtggatcacatcattcccatcaatggcggcggtgatgttctcttctggcctgagtggaaccaccaggcattgtgccagacgtgccacaaccgtaagacgacacgggaagatccagccacgaaagcgaaccgtaaggcgggtcatgtatcgcgagcaggaagaacgggcggcacaccgtaacgactggatgtatggcgatgatgactgaacaggagcaaaacaggctgatacgtggactgataaggcagcgtgacttatggaagacacaggagacagggcacaaagccaacaggacagggcgcacagaacgcaccacagcgaagcaattaaccgaccgtgaccgcgaggtcatggaatgttttcgcaatcgctggtgaggctgtcagagggggtgggggaggttttcaggacaaaccgtccctgccggacaccgaccgcctcctcaaatttttgtgcacgggattttttttgaaaataattgggcgaaaaaagaacatggcaagaccaccaaaagcccccgcttacctggatgaaatcgcggtcaggcagtggaaggaaaaatcgcgccagctttccggacgggaagaccttacccccgccgactggagcaatctggagcttattgcgttaactactccatataccgcaaagccgtcgaagaccttgccacgcgcgggttcagcattgttaacagtcagggcagcgagagcagaaaccccgccctgagcgcaaaggctgacgcggaaagaataatgatcaaaatggcttctttgctgggttttgacccggtaagtcgccgcagaaatccaccggaaacagaggaagaggacgagcttgaccgcctggcatgagtacgcagaaggcgtaaaaaacggcaaaattacggcctgtaaacgactgaaacaggccgttaaacggtatttttctgaccttgaaaaccccctttacacgttcgatccggaggtcgtggagcggtttattgccttttccagggtgtgtccgcacgtaaaaggcgcaatgcgcggtagccccattgagctggagccgtggcagcagttcgcctttgcgtgcatcctgggctttaaggttaaggccaccggacggcgcaaatacaccagcgcattcattgaagtgccgcgaaaaaatgccaaatccacggtcgccgctatcctggctaactggtttctggttatggaaaacgggcagcaggatatttacaccgccgccgtgagtcgtgatcaggcgcggatcgtgtttgatgatgcgcgtcagatgtgccttttatcccgaccgttgcgaaagcgggtaaatattcaggcacacaaggtgatacacccgaaaaccaacagcctgttaaagccactggcagcaaaagcggcaaccattgaaggtacaaacccgagtcttgccattgtggatgaatatcacctgcaccctgacaacggggtttattccgcgcttgaactgggaatgggggcgcgtccggaggggttattatttgccatcaccacatcggggagcaacgttgtttcagcctgtaaacaacactacgactattgctgccagatactggatggtgaagaggtgaacgaatccatgttcgtgctgatttacgagctggatgatgaaagcgaggttgacgatccggcgatgtggataaaggcgaatcccaatatcgatgtttccgtcgatcgtgaaaaactggcctcaaccatccagaaagcgcggggtattccgtcgcagtgggtggaaatgctcaccaagcgattcaatatctggtgtcagggggccacgccgtggatgggtaacggtgcatgggcggagtgcgccggaacgttcgcggaggcggatttatacgggcaggagtgctacgcggggctggacttatcatcaaccagcgatatttccagcgtgtgctatgcctttccggtcggtaaaaagattatgctggtttcccgtcactatctgccggaatttcagctacagaaccccgccaataaaaaccgcgccatctatcgccagtgggtaaaggcgggctggatacgcacaacaccgggtgactgcattgattatgaccgtatccgtgatgacatcatggcggatgcagagaatttcaatatcaggctggtgggtttcgatacatggaacgccacgcacctgaggacgcagctacagggcgcaggatttgaggtggagccgttcccgcaaacgtaccttcgtttcagtccggcggcgaaatcgttcgaagtttttgttaaccggaaggtgattgtgcatcgtggtgatccggtgctggcctggtcaatgagtaatgttgtgatgcagagtgacgcgaacgccaatatcaagccgaacaagaaaaaatcatccaacaagatagacccgagcgttgcggcgctgatggcgtttggcacattccaggcagagcatgaggaatttgcattcgatatgagcgacagccacaaagagcggcttgcgacgtttgatggtgtgtaacggaatggatgagagaggataatgctcatttaatggaataaattttcagtattatcggcacccactttcagggatgtttttgcgggttatttgagtggtgtttgcgggttattttgaatgtcttgcgggttacattctggctgatatttagatacgttgttttttaacgtattgatattaaagagtaaaaaatacttagcacgcgaagataacccgctaacccgcataacccgcactgttttgtatatatatacgaaaaattgcattcaggggggatcgaaatttctactgcctcttatctctttgagtgctcacctcgtcagattgttacacacaagaaataaaaaatgcttcgcgatggtaggtcgaatcactgtatcaaaaaacggtgtgtatcagcattaaaacaatacagatacgtgtattgcgctgtgtattgctcgatgatttataaagactgttttttcatgttaaatgattgatatacaggtgattttaaaaaacttgaaatattcttaccaaacacatgaatgtgtgggtcactgccgaatctgcctggatggatatgattaagtgggagaagtgcgaatacattgctccacaacatgagctgaaaacatatcccatgtgggtcggcgtcgaccttgctcataagattgatatctgtgcggcggcaaaactctggcgaaccgataacggacatgttcatgctgattttaaattctggcttccggaaggacggctggagcgatgctcgcggcagcaggcagaactttaccggaagtgggcggagatggataagctcatcctgacggatggtgatgttatcgatcatgctcagataaaaagtgacttactggaatggattggcggtgaaaacctcagggaactgggatttgacccgtggagcgcaatgcagttcagtctggcgctggctgaagaaggtataccgctggtggaagttccgcagacggtccgcaatctgtcagaggccatgaaggaaacggaatcactggtctatgccggacgtttccaccacagcaatcacccggtcatgaactggatgatgtctaacgttacggtgaaaccggacaaaaacaacaatatcttcccgaataaatccacgccggaagccaaaatcgacggtcctgttgcgatgtttacagcaatgagccggatgctggtcaatggcggtgaaccggagccggatctgtctgagcatctggtcagcgttggtattcgctcgctttaaccgaggtcattatgtttctgataattctcacgccactggtgggcgtgctgggggcgcttttgctgtcgtatggcacatggctgatttatcccccggcaggttttgttgttgccggggggctgtgcctgtgctggtcgtggctggttgcgcgttatctcgatcgtggtcactgggtcgcctccggaggtgagtaatgtttttccaggggctttttcaacgtaaaaataatacccccgtcacaacgcccgggatacttgcggaagaacttgggttgtcatacgacacctataccggaaagcggatcagcagtcagcgggccatgcggctgacggcggtgtattcctgcgtcagggtgctggcggagtctgttggtatgctgccctgcagcctctacaaaatcaccggcactcttaaaacacgggcagtggatgaacgactgcataagctgatttcggcaaaacccaatggctacatgacgccgcaggaattctgggaactggttatcgtctgcctgtgtctgcggggtaatttttacgcctacaaggtaaaggcactgggggaagtggtggagcttcttccgatagatccgggctgtgtggaaccgaagctgaacagccagtggcagccggtttatcaggtgacgtttccggatggttctgtggatgtgctgacccagaatgaaatctggcatgtgcgtaccctgacgctggatggacttgtcggtctgaatcccattgcatatgcgcgcgaggccatttcactggcagcggcaaccgaggagcatggtgccagattgtttggcaatggcgcggtaacatccggtgtgttgcgtacggatcaacaactttctgaccaggcttatgcgcgtatcaaaaaggattttgaggaacggcatgtcgggctgggaaactctcatcgtccgatgattctggaaatggggctggactggaaaacggtggcactgaatgccgaggacagccagttcctggaaacccgcaagtttcagctggaagaaatctgtcgcatgttccgcgtgccgctgcatatggtgcagaacaccgatcgtgccaccttcaacaatattgaagagctggggcttggtttcattaactattcccttgtgccgtatctgacccgtattgagcagcggatcaatacagggctggtcagggagagcaagcagggaaaattttacgccaaatttaatgccggagcattgttgcgtggcgacatgaaatcccgctttgaagcgtatgccacggggatcaactgggggatttattcccctaatgactgccgtgatctggaggatatgaatccccgaccgggcggtgatgtgtatctgacaccgatgaacatgaccaccagtccctctgctggcgatgacaacggtaagaaaaaggagagtggagatgcagacaaaacagcgtcttgatataccgctgaacctgaaatccgtcagtgattccggggaatttgaaggttacggttctgtttttggtgttaaggacagccacgatgatgtggtggtccccggtgcctttaccacaacactccagaaatggagcgaaaaaaaggcgctgcctgcgttgctctggcagcaccgcatggatgagcccatcggtgtgtacaccgaaatgaaagaagatgatgtcgggctttatgtcagggggcgattactcgttgatgatgatcccctggcaaaacgtgcacatgcccatatgaaggccggttctttaaccggcctttctattggctacatcctgaaagactgggagtacgaccgggaaaaaggggtattcctgctgaaagagatcgacctgtgggaggtcagtctggtgacgtttccttccaatgatgaagcacgcatcagcgatgtgaaaaatgcgctggcgcgtggggagatccctgatcagaaaattattgagcgggtcctgcgcgatgttggactctcgcgaacccaggccaaagcattcatggccgggggatatggcgctttatccctgcgtgatgctgaggatgtggatgccgcactgaatgcactgaaaaatcttaaattttaaccaggagaaaataatggctgatgttaaagatgtggaacaggtcgcgcaggagttgcagcggaagtttgacgattttaaggaaaaaaacgacaaacgtatcgacgcgatcgagcaggaaaagggaaaacttgctggtgaagtggaaaccctcaacggaaaactggctgaactggaaaatctgaaaagcgatcttgaagctgaactggctgaagtcaagcgtccggcaggcggcacgcaaaataaagttgccggtgaacataaagaagcgtttatcggatttatgcgtaaggggcgtgaagatggcctgcgtgagcttgagcgtaaggcgatgcaggtgggcaatgatgaagatggtggttatgccattccggaagaactggaccgcactattctgacgttgctgaaagatgaggtggtgatgcgccaggaagccactgtgatcaccctcggtggctcggattataaaaaactggtaaatctgggcggcacaacgtccggatgggtgggggaaacggatgctcgtccggaaaccgccacatcaaaactaggtctgattgaaccctttatgggggaaatctacggcaacccgcaggccacccagaaaatgctcgatgacgctttcttcaatgtggaagactggatcaacagtgagctggcgctggaatttgccgaacaggaagaaattgcctttaccagtggcgacggcagcaaaaaaccaaaaggttttctggcttacgagtccaccgatgaagatgacaagacccgtgcgtttggcaaacttcagcacattgcttccggtgcggcttccggcgtgactgccgatgcgatcattaaactgatttacaccctgcgcaaggcgcaccgcagcggcgcgaagttcatgatgaacaacagcagcctgtttgccattcgtctgctgaaggataacgacggaaattatctgtggcgtccgggtattgagctgggtcagccttcttctctggcagggtatggcatcgttgagaatgagcagatgccggatattgccgccgatgcaaaagccattgcgtttggtaacttcaaacgcggctataccatcgttgaccgcatcggtacccgtatcctgcgcgatccgtacaccaacaaaccgtttgtgggtttttataccaccaagcgaaccggcggtatgctggtggattctcaggcgattaagctgatgaaaattggggctgcaacccgccagaaagccgctgcgtaatgcggttttttttgtgcccgcgtaattgcgggcacaggaggaaaatatgctcctgaaagaagaggaaattaaatctcacctccggctcgatgatggtttgtacagtgacggcgattttctgaaactgctggcacaggcggtacagaaaagaacagagacatacctgaacaggaagttgtatgcaccggaagagacgattccggaagacgattctgacgggatgcatctgactgatgatgttcgtctggcaatgctgatgctggtcagtcatttttatgaaaatcgctcaacgatcaccgatgtggagaagctggaaacgccaatgagtttcagatggcttgctggcccttacaggattgtcccgctatgaaaatcagacaaagtcagaccagtgccacttaccttttaccggatcccggagagctgaatcgccgaataaagatccgccttcgggtggatgaacccaccgctgattttggtacggagccgacatatacggagtcgtttgatgtctgggcaaaggtggctcagccaggcgctgccgcttatcagggctcagtgcagacagaaaatatcgttacgcattattttacgatccgtttccgtcacgacatcacggcagatcatgaggtggtttattacggtcaggagtaccggatccggcgaatacgcgacctgaacggtcagcggcgttttttattgctggaatgtgaagaactgcgtacagcgcgacgacggggtgaatgccatgaatcagacagcatttttacacgtcgactttaaacaaccaaaggagctggagtttaatcgcgcccgtctgcgtcgggcatttgtgcagatcgggcgcgtctatatgcgcgacgcaagacgtctggtgattaaacgcggacgatccggtccgggagagaacccgggatatcagaccgggcgtctggcccgctccatcggttattacgttcccaaaaaaacgacgcgtcgccccggactgatggtgaaaatttctcctaaccagaaaaacgggcaggggaatcgccgtttccctgaaggcgcaccctattatccggcatttctgtattacggcgttcgccattcagcttatggaatggataaaaaggataagcggcagaagaagcaccattcttcggctttccggctggccccgcgtaataactttatggctgacgttattgagcggcggcgtcactggacgcaggaactgttgtcccgtgagttgcagtgttcgttacgtccggtaaaaaggaagcataaatgaaactgacaacaataattgcggcgttgcgtgagcgatgcccgcgttttgagaatcgtgttggtggtgcagcgcagtttaaggcgatccctgatgccggaaaactgcgtctgcctgctgcctatgttgtcccctctgacgatgcgccgggggaacaaaaatcacagaccgattactggcaggatttgacagaaggcttctccgttattgttgtgctcagcaatgagcgtgatgaaaaagggcagtgggcagcctatgacgccgttcatgatgtcgtagagaactctggaaagccctgcttgggtggatgccggacccgcaggggggcgagattgtttatgccggtggcacgctgctggatctgaaccgttacgaactgtattaccagtttgattttacggcgaagtatgaaatcacggaagaagacacgcgacaggcagaggacgtgaatgctctgccggatttatcctgctgagtattgatgtggattacattgatcctggtactggcccggatggtgactttgagcaccatctggaaatgagtttccctcagaaataagagtccctcatgtttgtgaaacccctgaaagggcggtcggttcctgaccctgcccgtggagaccttttgccttctgacgggcgaaatgtggaagaaaacagctactggctccgccgtatagcggcgggtgatgtggtacgtgttaaacaggataaggctaaagaatcatgacaataagttttagtgctgttccgtcgaatacgctggtgccgttgttttacgccgagatggacaattctgcggcaaatacagcagtgaccagcgcgcctgcattattgatcgggcatgccagcaacgatgccgccattgaggttaacagcctggtgctgatgccgtcggcagattatgcccgtcagatttgtggggccgggagccagctggcgcgtatggttgacgtctaccgtcagacagatcctttcggtgaactgtatgttattgcagtaccggaagccaaaggggcggcggcgacggtcagggtgacagttaccggagaagcagaggaaagcggcaccctgagtctgtatgtcgggcgctaccgtgtacaggtgcctgtggtgaatggcgatgatgctactgcggttgccaccgcgattaaggaagcggtaaacggggttatcaccctgccgtttgcggcgtcatctgatgcaggtgtggtgacgctgactgcccgccataaggggctgtatggtaacgagttgcctgtctgcctgaattattatggttctggtggtggtgagattctgcctgcggggcttcaggttgtgacggaagccggaactgcgggtagtggcgcgcctgatcttactgccgctgttgctgctatgggcgatgaggcattcgactttatcggtctgccgttcaacgatgccgcctccatcaatatgatgatgaccgaaatgaatgacagcagcggtcgctggagttatgcgcgccagttatacgggcatgtctataccgcaaaactgggaacgctgtcagagctggttgatgccggagatatgcataatcagcaacatatcacgcttgccggttacgaaaaagaaacccagtcgcctgtcgatgaactggttgccagtcgccttgcccgtgaagcggtatttatccgcaatgatccggcccgtccgacacagacgggggaactggtggggatgcttccggcaccgaaaggtaagcgattcatcatgacagagcagcagacccttttatctcacggcgtggcgacggcttatgtggaaggcggcacgttgcggatccagcgttccgtaaccacatacaaaaagaatgcatatggcgtggcagacaacagctatctggacagtgaaacactgcataccagcgcatatgttcttcgcaaactgaaatcggtcatcacaagcaagtacggacgccacaagctggcaaatgatggtacccgttttggtcctgggcaggcgattgttactcctgccgttatcaaaggggagcttctggcgacatatcgtcagatggagcgtgccggtattgtggaaaattacgatctgtttaaacagtatctgatagttgagcgtgatgcggataacccgaaccgactgaacacgctgttcccgccggattatgttaaccagttacgtgtctttgcggtggttaaccagttccgtctccagtattcagaggagtcagcataatggcaaagatcgccggaacctgtttttttaaagtggatggtcagcagttatcgctgacaggtggcattgaagtgccgatgaacaccaatgtccgggatgatgtcgtcggcatggctggtgatgtggattacaaggagacctggcggtcaccttacgttaagggcacgtttaaagtgcccaaaaattttccggtcgacaaaattaccacctcagaccagatgacgattactgccgagctggcaaacggcatggtgtatgtgctttcggcggcatggctgcatggcgaagcaaaccataatgccgaagaaggtacggcagatcttgaattccacggcgaagagggaggatatcagtaatgagcgtgacagaaattgttttaaaaaaaccggtgacagcgcataacgaaacgctgcatgtgctggagttgcgtgaacccacgtatgacgaaatcgaggccctgggttttcctttcattatttccggtgagggcagtataaaactggacagccaggtggcactgaaatatatcccgctgctggcggggatcccgcgttcatcggcggcgcagatggcaaaactggatatttttaagaccagcatgcagatcctgcgtttttttacccagtcggagacgggaagcacctccggaaacgactctacaatgttgcctggttctggaaactgaatccactggagctgcgacgggtggctatttcgcagtttacagaactggaagccgaggccgtccgcattaacgaggagatgaagcatggctgacagttttcagctgaaggcgatcatcactgccgtggataaggtatcggcaccgctgaagggaatgcagcgccagctgaaaggttttaaaaaggagtttgccagcctgtcactgggcgcagcgggtgccggaaccgcagtactgggggcgctggcgctcccggtcaaatctgccattgcccttgaatcaaaaatggcggatgtccggaaagtggtggatggtctggatacgccggaagcgtttaaggcaatgacggaacaggtgcgcgacctgtcaacagaactgcccatgtcggcggaaggtatcgccgaaatcgtggcggcgggtggtcaggctggcatcgcccgtgacgagctgatgcagtttactgacgacgccgtgaagatgggggtggcctttgacaccacggcggaagaatccggtcagatgatggcacagtggcgcactgcctttaaactgacacagggagaggtggcagggcttgcggacaagattaactatcttggtaataccggtcctgcgagtgcgaaaaagatttctgatgttgtgacccgtattggccctttaggcagtgttgcgggtgtggcctccggagagattgccgcaatgggggcaaccattgccggaatgggggtggaatcagaaattgcggcgacggggataaagaattttatgctgtcgctgacagcggggaattctgccaccaaatcgcagaaaaaagcgcttcgcctgttgcgcattgacccgaaaaaactggcggcggatatgcagaaagacgcccgtggggccatgctgcacgtactggattctctggcgaaagtgccgaaagaaaaacaggctgctgtgcttaatgcgctgttcgggaaggagtctctgggagccattgcgccgctgctcacgaatctggatttgttgcgaaccaattttaatcgtgtggcggatgcgcagcagtatggcggctcaatgcagaaagaatatgccgcccgtgccgcgacgacggaaaatcagttgttgctgctgcagaaccagatcaatgcgatttcttccacgttgggggaaaccttcctgccttcaatcaatgaaggcataaaagagatgaagccttttctggaagaagtgcgcacgtttgtcagagaaaatcctgaggtcgtaaaaaccatcgcgaaaactggagcggcattactgacgatgggcgtggcgattggcacattgacacgcataacaaaaatcatgggtagcgtgatgaatatgacgccggcaaagggattaattgcgcttctcgtcggtggtgcatatctcataattgataactgggaaaccgttggaccggttattaaaaatgtctgggaagtcattgatggcaccgcccaggctatggggggatgggaaacgatccttaaagctatcgccatttttatggcgacaaagtgggtcaccgatgtcaccaaatcaatcagcattgtgacgaaggatatgcgcacactcggcaaggtcactgccgctaccggattgtttggtaaaggcgggggcgttatcggaaaagccggtgtatatgggatgctggcttctatgatgtgggagcccgtcgaaaatgcacttgaatcaattctgcctgagggcgatgttaactgggccagggatcatggcatatatctggcctctgactggaccccgttttttaatcgaaaaaattatgaggaataccaggcatcccttaatcagccgcgtcagtacaaaccgaatgttcctttgcttaatccggcgatatcgtctgtggcagcacgtggtgaaatcaaagtcacgtttgacaatgcgccacagggaatgcgcgttatcgatttgccgaaaacaggcgatccctttatgaaaatcacccatgacgttgggtattcacctttcaggcgttaataatggggtatcagaatggattttccttccttaccttctttgtcctctttgttttcttcatcttccggaacgacctggcgcgataatctttacgatgcttcatttcgtggcgttccgttttcggtggagagcgacgagggttcgttcggacgccgcgttcaggtccatgaatatccaaaccgtgacaaaccgtacacggaagatctcgggcgtgccacgcgacggctgacgattaatgcgtatctcgttggtgatgattacgcagagcagcgcgacaggctgattaccgcgattgaaaccgccggaccggggacgctgatccatccccagttcggtgaaatgcagggctgtattgacggacaggtgaccgtttctcactccagcactgaaggtcgtatgtgccgggtttcatttcagtttgttgagagcggggaactgtcatttccggtcgccggagccgcaaccgccagaaaactggaggagtcgtccggattcctggatgagctgattgaagacatgttcggcgattttgatctcgcgggaatatcggactttattcagaacgatgttattgcccgggcaaccgatatgctgggaaccgttcagacggctttcaaaatggttaattctgctgtttctgccggaatgaggctgatgcagggcgatttatccgtcattctgatgccgccatcggttgccagtgattttgtgcatacgttgcaggatacctggcgggcaggaaccagactggtggataacacacaggatctggtgcagtccataacaacaatgtccggtattacgctggatccaggactggcaccgcgcgcggtgtggcccacagattccgcatcggttgtcaggcaaaaacagcagacaaatctggtggctgcagtcatccggacgacggcaatcagcgaggctgcaagggcggtcacttcactgccgcaacccggaagtctggtgaaaaatcagcaggcggttgtggctgttggtggttccactgaacgtcagtccgatatcattcatgttcctcatccggcacttgacagtgtggctgccagtacagagcagaatgagatagcacaaccacccacgcgggaaaatctcaccatcatacgcgaatcgctgaacgcggcgattgaacaggagctcaggcgtacggcggatgacaggctgttttttcagctgacgtcattacgtacagaactgaaccgggatattcaggcccgtctggttcagacggaggaaaccgcagagcgaacgccagcggaggttcttcctgcgcttgttctggctgcgtcatggtacgacgatgcgtcccgtgaaactgatatccttgagcgaaatgccatctctcatccgggctttgttccggtcagggcattaagggtacccgtcagatgaataataccgttttacttcgggtttccggtcgcgaatggggcggctggacatccgtccgtatcagtgcgggcattaaccgtattgcccgggattttaatgtcgccattaccacccgctggcccggcagccgggattatcagccccggataaaaaatggtgagctggttgaagtgcttatcggggatgagcccgtgctcaccggatatgtggaggctctaccgcttcgttatgacgccagcagcgtcagcatgggaattgtcgggcgaagcaaaacagccgatctggttgactgctctgctttgccactccagcagagcggaaaaaacctgctcagaatcgtcagtgaactggctgcaccatttggcatcaccgttgttgatgctggcgtgccgcagacagcggtgattgatgcccagccggaacacggcgaaaccgttgccgattgtcttaaccggttgctggagcaggttcagacgctggcttatgacgatgaatgcgggcgactggttctgggaaaaccggaacaggcaaagcggcgacagcactggtgctgggagagaatattctttcctgtgacacggaaagaagcatcagagagcggttttctgaatatcaggtcagtgggcagcgcccgggcaacgatgatgattttggtgaggccaccattgccgcaatacgtcagaccattcaggacagtggtgtgacccgttatcgccctttgttgattcagcagtcaggcacagcaacgacagcaacctgtaaggcccgttgtgaatttgaagcgcgtcaacgggctgcgcttacccgtgagacaacatatacggttcagggctggcggcagggcagtggcgcgttatggcgtccggggttatctgtcatcgttttcgacccgctgaataattttgataatgatgaactggtgatcgcagaagtcacctataaccaggacgaccggggcacgacgactgaattacgggttggcccggcagatgcttatctcccctgagcctgttaccggcaggaagaaaaaaaatgttgaggaggatttctgatgaacgggttttctcttcgcaatctgatttcccgggctgtcatcacggcggtggattcagccagaaagtgtcagtctgtagggttgaaaatgatagccggagatcagaaacaacacgttgagcaccttgagccttatggttttacatctgctgcacataacggtgctgagggcgttgctttattcccggcgggcgatcgttctcatggtgtggttgtggtcgtggctgacagacgttaccggttgaaaggactgaaacgtggggaagtggcgctttatgacgatcaggggcaatccgttgtcctgactcgttccggtattgtggtgaacgggggcgggaagcccattatttttcaaaacgcgcctaaagcgcgctttgaaatgcctgtcgaatccaccgctgatattactgacaattgcgacagtggcggactcagcatgcagcaaatgcggcagacctacaatgcccacaaacacaccgaaaatggtgatggtggtgggatcactgacacgccagatcaaccgatgggctgaaaatcatgatgattaatgttaacgggcgatccgtgtcgaccggggcttcgctcgaccttctgacgcgtgctgtgattatttcgctttttacctggcggcgtgccgggcgggatgatgatgcaccgcagatatttggatggtggggagatacctggcctgcggttcagaatgatcgcacggggtcgcgtctgtatctgttgcgacgcagcaagctgacaaataaaaccccgcagcttgccagagattatgcccgtgaggcgctggcgtggatggtggaggatggtgttgcttcccgtcttgatattaacgctgtccggaccgggacagactcgctggcacttgccattaccatttaccagcgtgacggcaatattcacaacattatttttgatgatatctggagtgaactgaatggctgacagtcagttttatcgccccggccttccgcaacttatttctatgatccggagcgatttattaacccgctttgagcaggatacgctgcttcgtcgtatggatgcggaagtgtatgcccgtgtacaggctgcagccgtacacacgttgtacgggtatatcgattatcttgccagaaatctgttgccggacatgtgtgatgaagactggttgtaccggcacgccagaatcaaacgctgcccgcgaaaagatgcggtggcagcccggggatttgtgcgctgggatggcgtagaggggacgccggtattgccagcgggaacgcagatccagcgtgatgatcaggtgaccttcaccacgacggcgacggtgaccgcagccgatggtcttctccgggtgcctgttgtggcagacgaaccgggatcggcggggaatacggatgatggtattgccatgcagctgggaacacccgtcagtggtctgccgtccacaggatacgctgacaccattacagacggtgaagatattgaaaatctggaaatatggcgtgcccgcgttatggaacgttattactacattccacaggggggcgcagatcctgattatgttatctgggcgaaagaagttcagggtattaaccgtgcatggactttcagacactggaaaggtattggaacggttggcgtgatggtggcgacgaacgatcctgaacacccggccccggatgaaagcgtgattaacgcagtcagggaccacatccttcctctggcacctgttgccggaagcggattgtatgtattcggtgccacagaaaaagttatcccgatgacgattgcgttatcgaaagacacaccgcaaatcagggcggcaataaaatcagaactgaatgcgctgatgttccgggatggtgtgccggaagggcgcatgtatctgtccagaatcagcgaggctatcagtttatctgcaggcgaggtggcccatcgactcatcgacccttcatcggatattgacctgggggaaactgagcttccggtactcggggagatcacatggcaggcttatgacccggtaaggagtaaataatggatacgttacaggatgattatacaaaattgttgtatggcctgatgccgccgggacctgcatggtcagataccgacggtgtacttgacggtctggctccatcgcttgtgcgtgttcaccagcgggctgatgaactggtgattgaaatcgatcccggtcagtccacagagctgattgaacgttatgaaaaattgtatggtttacctgattcctgttctcctgtcggaacccagacattacgccagcgccagcaacgtcttgaagcaaaagccaatgtagctggcggcataaatgagcagtttttcctggatcagcttgaggcgctgggatataccggcgtgacgatcgaacagttccagaatctggatgcaagccccgatccggaatggggggatcgctggcgttatttctggcgtgtgacgttgccggtggatgccggtgctcagtggcagacatgcacggacgcctgcaacacaccgatccggacgtggggggatacggttgcggagtgcgtgattaataaattatgtccgtcacatactgtcgttttattttcctatccagatgaggatgaagatgcacaggattgatacgctgacagcggtaaaagataagtttggcccgggcaagaacggatttactgacggaaatcttcgcacaggacgccttgccacctggctgaacagtgccatgtgggatgccattcaggaggaaatctgtggtgtcattgagaaagccgggatagaactgaataaagaagaacacgatcagctatataaagccatattattactggtgggcggtgcgattaacgaagaggcattgctgataaaaaataacctttcggatgtggaagataaggatgaggctgttgaaaacctcggattaaaacctacggtggataaggcaaaaaatgccgttcagcgtgatggtgacaccatgaccggagaactaaaaatccgtggagttaatgcgctgaggattttcaacgaagcctttggtctgatttttcgtcgttcggaagagagcctgcatctcattcccacccaggaaaatcagggcgagaatggcgatattggcccactgcggcccatttccattaacctgcgccagggcgatgtggttattggtgacaggattggcatcggtaatgagaacaatctgggtgaaaaatcactcacgctctgtgatagcaataccggttttaagtggggcggacgcggtgttattaatgtgtttgcagagggacacaacgtctttcgttttacaaaaaacggtgtgctggcattagaaaatctctcgaccggcaatttaagaaagttcacgctgtcgtgtgacagttcttccacgaagagtgcaagatttaatctatggggaaattcctcaaggcctgttgttgcagagcttggtgatgattctggctggcatttttacagtcagaggaatacggataacagcataacgtttgccgtaaacgggcagatggttccatcaaactacggaaactttgatgcccgctatcagcagcgaaatggcggcgtgcaggatgtgcgttatggttccgaaatgtattacaacccgggaggtaaccaggtatcctggacatttcgctcaccttcaggccacgggttatccggtattaatgtgcaggaaaccggaagtaattcggcagataacatcggcggcgtgtattaccgtccgcttcagaaactgattaatggcacctggtataacgtggcgagtgtttaacaatgttacatttaaaaaatattactgcgggtaatccgaaaaccgcggaacaatatcaactgacaaaacaatatggtgtcacctggcttttttcggaagacggcaaaaactggtatgaagaacagaagaactttgccagtgacacaataaaaatggtttactccggggacgggcgcgtggtgtgggtcggtaaggatgtgacaggcattgaaccccgtaacgccagtgttattgaagttccggatattaccgccaatcgccgtattaccgcgcctggttactggttctaccgcaatgatgaatttgtttttgactacaaacttaaagcggaagatgagcgtgatgcactgttaaaacaggccagcatcatgaccagcgaatgggaaaaagacctgctgctgggattaatcagtgacgaagacagggagaaactgaaagcgtaccgcatttacgcgaaatcgctgcaggcgatggatttcaacattatcactgataaaacctcatataacgccattgaatggcccgtctctccggaagcctcttcctgatttaatttatcgcgagaaaaactatgtctgtagtgatatcaggtgcgctgatagatggcgcaggcatccccatgtccggatgccacataattctgaaatcccgggtaaacacctcagaagtggtgatgcgcacagttgccgacgtggtgacaggaaactgtggcgagtactgttttaaggcgcaaaccggaaaatattgcgtatatctgaagcaggactggcgcgacgagtactgtgttggcgacattgctgtatacgacgactccaggcccggtacgctgaacgactttctgactgcccttgatgaaggcgacctcaaacccgacgtggtgaagcgctttgaggaaatggtggcgcaggcgcagcagagcgcggaagcggcagcggaaagcgaacaacaggccgggcaacacgtcgctgatgcgcaacaaattaagagcgactgcgagacgctggcggataacgtacagcagaatgcagaagccgttgccaaagataaaaagcaggtggcacagctggcatcatctgccacacaggatgccgcccgcgcagagcaggccgtcaaggatgccgacacgatagtcaagaaagcggtcgataaactcggtgaagctgcaacgctgaccggcgaggcaaaagccagcgccgaagcggcagcaaaaagcgagcagaacgcgaaacagcataaggacgaggcgcaacggatagttgatgacctgaagggaagcaatgcttccacgacagaaaaaggcctggtgcaactctgtagtgatacggacaacgacagcgaagagctggcagccacaccaaaggctgtcaaaaccgtcatggacgagacgaaaacaaaagcaccgctggacagcccggcgttcaccggcacgcccaccacaccaacaccaccggatgatgccgtcgggctggagatggcgaacgtggcgtttgtccgcaaactgcttgctgcgctggttgactcgtccccggaagccctggacacgctgaatgagctggcagcggcgctgggtaatgacccgaactttgcgacaacaatcatgaatgcgctggcgggtaaacaaccactcagcgacgtgttaaccgcaatcagcaatctggaagaacgggcagataaccttctgtgctttaatcaggacgggaatgcttcactgtctccgctgtcagaaaaagcccggtcactgctggcgcaggccacagtggaagccatgcgcaatgagcttgagctgaaaagcgcagcggtaaaggacattcagacagacctttacgacagcacggaaggccgtgttgcgctgccgggggcgttcggatacgggcatgtgttctcttcgtcggaagtggtgtatttcagcgccaaaaatggccctgccgaatttctgaaatgggtgttcgaagtcacccccgggcgttacgcggtaacacaatatggagggagtggcatttcatataatcccatcattgcttatgatggggggcaaccctatttcagggggcttgtagatatagaaatacgatgcggaattggttcaggcggtattgaatcagaaacaggccggtggataacttttcatggcgatgccgaatacagcggcgctactggtgaggggccggctaagtatcaggtattggttacaaaatcaatgtcttcggcgacacttcccggggcatggtcgcggctattctggtcacgcgaccgactgatacaactgttatgtgcaggagatactacatcacagcgcgctccgcaaccgggtagcctggttcttgccgcatacctgccagatagcggcagcagtgatgtcacattacttcgtacgcaacctgtgccgggatcaaggctccggcaggtggtcttcgaagctgagtatcgcggttcaggatttagtgccgctgccaggtcatttgtctacggaagtaccctgcctggcacatatctcgctttatcaggaggcccggatgtcacgttttataatcgggggctggtttctttgtttgtgagggtttcatgatgcaaattaaaaaaatcaccagtccccgctacaccgagtccggtgcgattgactgcgacgtgctgtttgaaggaatggaagacccgcttccgtacacagccacgccagaagacaccgcgacgacaggtcagcaaatctggcaggaactgcaaagcggcaaatggggagaaatcgccccgttcaccgtcacgccggaacttatcgctgcggcaaaagatgccaaaaaacgggaaatcgagctctggcgcacagaacaggaggcgcagccgttcacgttcgaatggaacggtcgtacctggaatggtggtgcagactcaataagtcgtattgcgcccgtggcaatggcgacaaaggttgcaggtacgcggtcaacgctgggatggggggatgcagcaaataaccttgtcactctgacaatggcacagcttcaggagctggcagccgcaatggcgcaggctcaggtcgatcgcaatgacgagatttatcgccgtcagcgtgagatgaagcaaaaactgaatagtctggaggatttggtttcaatcaggaaactggtcgttagcccagaaaaaacttgagaccccaaagacatcaaaagaggtgttcgcggggaaaatatcgctgatattaaaggctgaaaatataccaattggtataccaagtttataccaagagccaaaaaagcaaaggggctaccatttggtaaccccttgattatttggcggaagcgcagagattcgaactctggaaccctttcgggtcgccggttttcaagaccggtgccttcaaccgctcggccacacttccggaatgacgcacactataaacatcccgatgcggcgtgtaaacccctaatttgtttgtttgcctgaaaaacagccaaaagtgcattgatagcgtgaaataacagcagattgatcatttcatcaccatgaattccttctcttttactcgtttagcaaccggctaaacatccccaccgcccggccaaaagaaaaataggtccatttttatcgctaaaagataaatccacacagtttgtattgttttgtgcaaaagtttcactacgctttattaacaatactttctggcgacgtgcgccagtgcagaaggatgagctttcgttttcagcatctcacgtgaagcgatggtttgccttgctacagggacgtcgcttgccgaccataagcgcccggtgtcctgccggtgtcgcaaggaggagagacgtgcgatatgaataacgaggaaacattttaccaggccatgcggcgtcagggcgttacccggcgcagctttctcaaatattgtagtctggctgccacgtcgctgggattaggcgcgggaatggcaccaaagattgcctgggcgctggagaacaaaccgcgcattccggtggtatggatccacggtctggaatgcacctgctgtaccgaatcttttatccgctccgctcacccactggcgaaggacgtcatcctttccctgatttccctcgattacgacgatactttgatggctgccgccggaacccaggcggaagaagtctttgaagacatcatcacgcaatacaatggcaaatatatcctcgcagtagaaggtaatccgccgctgggcgagcaggggatgttctgtatcagcagcggtcgaccgtttattgagaaactcaaacgtgccgctgccggagccagcgcgattatcgcctggggaacctgcgcgtcctggggctgcgtgcaggccgcgcgacccaatccgacgcaggcaacgcctatcgacaaagtcatcaccgacaaacccattatcaaagtacctggctgcccgccgatcccggatgtgatgagcgccatcattacttacatggtgacctttgatcgcttgccagatgtcgacagaatgggccgtccgctgatgttctatggtcagcgaatccacgataaatgctatcgccgcgcccacttcgacgccggagagttcgtccagagttgggatgatgacgctgcccgcaaaggttactgcctgtacaaaatgggctgcaaagggcctaccacctataacgcctgttcctccacacgctggaatgatggcgtttctttcccaatccagtctggtcacggctgcctgggctgtgcggaaaatggtttctgggatcgcggttcgttctacagccgcgtggtcgatattccgcaaatgggtactcattccaccgccgataccgtcggtttaaccgcgcttggcgtggtggcagcggctgttggtgtgcacgcagtcgccagcgccgttgaccagcgcagacgtcataaccagcaacctacagaaaccgaacatcagccaggcaatgaggataaacaggcatgagcactcagtacgaaactcagggatacaccatcaataatgccggacgccgcctggtggtcgacccgattacgcgcatcgaaggccacatgcgctgcgaagtgaatattaacgatcagaatgtgatcaccaatgccgtctcctgcggcaccatgtttcgcgggctggagatcatcctacaagggcgcgacccgcgcgatgcgtgggcgttcgttgaacgtatctgcggcgtctgtactggcgtacacgccctggcttcggtttacgccatcgaagatgctatcggtattaaagtgccggacaacgccaatatcatccgcaacattatgctggcaacgctctggtgccacgatcatctggtgcacttctatcagcttgccgggatggactggatcgatgtgttagatgcgctgaaagccgacccgcggaaaacctccgaactggcgcaaagtctctcctcttggccgaaatcatcccctggctatttcttcgacgtacaaaaccgcctgaaaaaatttgttgaaggcgggcagttggggatcttccgcaatggctactgggggcacccgcagtacaaactgccgccagaagctaacctgatgggctttgcccactatctcgaagctctcgatttccagcgtgaaattgtcaaaatccacgcggtctttggcggtaaaaacccgcatccaaactggattgtcggcgggatgccttgcgccatcaacattgacgaaagcggcgcggtcggggcagtcaatatggaacgcctgaacctggtgcagtcaattatcacccgcacggcggacttcattaacaacgtgatgatccccgacgccttagccatcggtcagttcaacaaaccgtggagcgaaatcggcactggtctttctgataaatgcgttctcagctacggcgcattcccggatattgccaacgactttggcgagaaaagtctgctgatgcctggcggcgcggtgattaacggcgacttcaacaatgtgctgccagtggatttggttgatccgcagcaggtgcaggagtttgtcgaccacgcctggtatcgatatcccaacgatcaggtcgggcgtcatccgttcgatggcatcaccgacccgtggtacaaccccggcgatgtcaaaggcagcgataccaacattcagcagctgaatgaacaggaacgctactcgtggatcaaagcgccacgctggcgcggtaacgcgatggaagtggggccgctggcgcgcacgttaatcgcttatcacaaaggcgatgctgcgaccgttgagtcggtcgatcgcatgatgtcggcgttgaacctgccgctttccggtatccagtcaacgttaggccgcattttgtgccgcgcgcacgaagcgcagtgggccgcaggtaagttgcagtatttcttcgacaagctgatgaccaacctgaaaaacggcaatctcgccactgcttccacggaaaaatgggaacctgcaacctggccgacagagtgccgtggtgtcggttttaccgaagcgccgcgcggggcgttaggccactgggccgccattcgcgatggcaagattgatctctaccagtgcgtggtgccgaccacctggaacgccagcccgcgcgatcccaaagggcagattggcgcttatgaagcggcgctgatgaacaccaaaatggcgatccccgagcaaccgctggagatcctgcgtactctgcacagctttgacccgtgcctcgcctgttcaacacacgtgctgggcgacgacggtagcgagctgatctccgtgcaggtgcgttaacagcgaaggagaatcatcatgcaacagaaaagcgacaacgttgtcagccactatgtctttgaagcgccagtgcgcatctggcactggttgacggtgttatgcatggcggtgttgatggtcaccggatactttatcggcaagccgctaccttccgtcagcggcgaggcgacgtatctgttctatatgggctacatcaggttaattcacttcagcgccgggatggtttttaccgtggttttgctgatgcggatctactgggcttttgttggcaatcgatactcccgcgagctgtttatcgtgccggtatggcgtaaaagctggtggcagggcgtgtggtatgaaatccgctggtatctgtttctggcaaaacgtccgagtgccgatataggccataatcccatcgcccaggcggcgatgttcggctatttcctgatgtcggtctttatgatcatcactggttttgcgctgtacagcgaacacagccagtacgctatttttgcgccgttccgttatgtggtggaatttttctactggacgggtggcaactcaatggacattcacagctggcatcggctggggatgtggctgattggcgcgtttgtgatcggtcatgtctacatggcgctgcgtgaagacatcatgtccgacgacacggtgatctccaccatggtcaacggctaccgtagccacaaatttggcaaaataagtaacaaggagcgttcatgagcgagcaacgcgtggtggtcatggggctgggcaacctgctgtgggccgatgaaggcttcggcgtgcgggtggcggaacggctgtatgcccattaccactggcccgagtatgtggagattgtcgatggcggtactcagggactgaacttgctggggtatgtcgaaagcgccagccatctgttgattctcgatgccattgactacgggctggaacctggaacgctgcgaacctatgccggagaacgcattccggcttatctcagcgcgaagaaaatgagcctgcatcagaacagtttctccgaagtgttggcgctggcggatatccgcggacatctgccagcacatattgccctcgtcggtctgcaacccgcaatgctcgacgactacggcggtagcctgagcgaactggcacgggagcaactgcccgctgcggaacaggcggcgctggcgcagcttgctgcgtggggaattgtgccgcaaccggctaatgaatcgcgctgtctcaattatgactgtctgtcgatggaaaattacgaaggcgttcgcttgcgccagtaccggatgacacaggaggagcagggatgagcaacgacacgccatttgatgcgttgtggcaacgaatgctggcgcgcggctggacgccagtcagtgaatcccgtcttgacgactggcttacgcaagcgccagacggcgtggtgttattaagcagtgacccgaaacgcacgccagaggtcagcgataatccggtaatgattggcgaattactgcgcgagtttcccgactatacatggcaggtggcgattgctgaccttgagcagagcgaagccatcggcgatcgctttggcgtctttcgctttcctgccactttagtgtttaccggcggaaactatcgcggcgtgctgaatggtattcacccgtgggcggaactgataaacctgatgcgcgggcttgtcgaaccgcagcaggagcgtgcctcatgagcgaaacttttttccatctgctggggccaggaacgcaaccgaacgatgacagtttcagcatgaatccactgccgatcacctgtcaggtgaatgatgaaccgagtatggcggccctggagcaatgtgctcacagcccgcaggtgattgcgctgttaaacgagttacaacatcaactaagcgaacgccaaccgccgttgggcgaggtgctggcagtcgatctgttaaatctcaacgccgacgatcgtcactttatcaatacgcttctcggggaaggggaagtgtcagtgcgcattcagcaggctgacgacagtgaaagtgaaatacaggaggcgatcttctgcggattatggcgggtgcgcagacgtcgcggcgaaaagttgctggaggacaaactggaggctggctgcgcgccgctggcgttgtggcaggcggcaacgcaaaatctcttgccgacagattcgctgttaccgccgcccattgatggcctgatgaatggcctaccgttggcgcatgagttactggcacatgtacgtaaccccgacgcgcagccgcacagcattaatctgacgcaattacccatcagcgaggctgatcggctttttctctcacgtctctgtgggccgggaaatattcagattcgtaccattggctatggcgagagctatatcaacgccacggggttacgccatgtctggcatttacgctgtacggacaccttaaaaggcccgttactggaaagttatgaaatctgcccaataccggaagtggtgctggcagcgccagaagatttggtcgactctgcgcagcggcttagcgaggtatgtcagtggctggcggaagctgcaccgacgtaaaaagacggtaagtatcgctttcagtcttatgaatatcgcaatcggcgaatacctctggtcgtagagtttcaggataaagagggagatctaccattatcgggttatttttctctcttcgcctacaggagtgcgcatgtgggatgtcattgatttatcgcgctggcagtttgctctgaccgcgctgtatcactttttatttgtaccccttaccctggggctgatttttttgctggctattatggaaaccatttacgtggtcaccggcaaaacaatctgccgcgatatgacgcgcttctggggtaagctcttcggtatcaattttgctcttggcgtggctaccggcctgaccatggagtttcagtttggtactaactggtcattctattccaactatgtgggcgatatttttggcgcaccgctggcgatggaagcattaatggccttcttcctcgaatccacctttgtcgggctgttcttcttcggctggcaacggctgaataaataccagcacctgctggtgacgtggctggtggcgttcggttcaaatctctctgcgttgtggatattgaatgccaacggttggatgcaatacccgaccggtgcgcattttgatatcgacaccctgcgtatggagatgaccagcttcagcgagctggtctttaatccggtcagccaggtgaaatttgtgcacaccgtaatggcgggctacgtgaccggggccatgtttattatggcgatcagcgcctggtatttactgcgcggacgggagcgcgatgtcgcattacgctcgtttgccatcggttccgtcttcggtactctggcgattatcggtaccctgcaactcggagacagttctgcgtatgaagtcgcgcaagtacaaccggtaaaactggcggcgatggaaggggagtggcaaacggaacctgcacctgcaccgttccatgtggttgcctggccggaacaggatcaagagcgtaacgcctttgccctcaaaattcccgcgctgctagggatcctcgccactcactcattagataaacccgtgccgggtctgaagaatttgatggctgaaacctacccacgcttgcaacgcggacgtatggcctggctgttaatgcaggaaatatcgcaaggcaatcgtgagccgcatgtgttgcaggcattccggggactggaaggtgacctgggctacggcatgttgctctcccgctatgcgccggatatgaatcatgtcacagccgcacagtaccaggcggcgatgcgtggcgcgatacctcaggttgcgccggtattctggagtttccgcatcatggtgggctgtggttccctgctgctactggtgatgctgattgcgcttgtccagacgctgcgtggcaaaatcgaccagcatcgctgggtgctgaaaatggcgctctggagtttgccgttgccgtggattgcgattgaagccgggtggtttatgaccgagtttggtcgtcagccgtgggcgatacaggacatcttaccgacatactccgcgcactccgctttaaccacaggacaactggctttctcactgatcatgatcgtagggctttacaccctgttcttaatcgccgaagtctacctgatgcagaaatatgcccgtctggggccgagcgcgatgcagagtgaacaaccgacgcagcaacaggggtaaaggagaaaatcatgtttgattatgaaacattgcgcttcatctggtggctgctgattggcgtgatcctggtggtctttatgatctccgacggatttgacatggggatcggctgtctgctgccgctggtggcgcgtaatgatgatgaacgccggatagtggtaaacagcgttggtgcacactgggaaggcaaccaggtctggttgatcctcgctggtggggcattatttgccgcctggcccagagtgtatgcagcggcgttttccggcttttatgtggcgatgatcctggtgctgtgctcactgttcttccgcccgctggcctttgattatcgcggaaaaatcgccgatgcacgctggcgtaaaatgtgggacgccggtctggtcatcggcagtctggtgccgccggtagtcttcggtatcgccttcggcaacttgttgctcggcgtgccgtttgccttcacaccgcaattacgcgtggagtatctcggcagcttctggcaactgctgacgccattccctttattgtgcggattgctcagccttgggatggtgattttgcaaggtggcgtctggttacaactgaaaactgttggtgtgattcatctgcgttcacagctggcgaccaaacgcgctgcactgttggtgatgctgtgctttttgctggcgggttactggctgtgggtcggtattgatggctttgtactgctcgcccaggatgctaacggtccttccaatccgttaatgaaactggtggcagtgctacctggtgcctggatgaataattttgtcgagtcgcccgttttgtggatcttcccgctgctgggattcttctgcccattgctgacggtgatggcgatttatcgtggtcgcccgggttggggatttttgatggcatcattgatgcaatttggcgtgattttcacggcaggcatcacgctgttcccctttgtcatgccgtcaagcgtgagtccgatctccagcctgacgttgtgggacagtacttccagtcagctgacgctgagcattatgttggtaatcgtgctgatatttttgcccattgtgttgctctacactctctggagctactacaaaatgtgggggcgcatgacaacagaaactctccgccgtaacgaaaacgagttgtactaaggagcagaaacaatgtggtatttactttggttcgtcggcattttgttgatgtgttcgctctccacccttgtgttggtatggctggacccgcgtctgaaaagttaacgaacgtaggcctgatgcggcgcattagcatcgcatcaggcaatcaataatgtcagatatgaaaagcggaaacatatcgatgaaagcgatcttaatcccatttttatctcttctgattccgttaaccccgcaatctgcattcgctcagagtgagccggagctgaagctggaaagtgtggtgattgtcagtcgtcatggtgtgcgtgctccaaccaaggccacgcaactgatgcaggatgtcaccccagacgcatggccaacctggccggtaaaactgggttggctgacaccgcgcggtggtgagctaatcgcctatctcggacattaccaacgccagcgtctggtagccgacggattgctggcgaaaaagggctgcccgcagtctggtcaggtcgcgattattgctgatgtcgacgagcgtacccgtaaaacaggcgaagccttcgccgccgggctggcacctgactgtgcaataaccgtacatacccaggcagatacgtccagtcccgatccgttatttaatcctctaaaaactggcgtttgccaactggataacgcgaacgtgactgacgcgatcctcagcagggcaggagggtcaattgctgactttaccgggcatcggcaaacggcgtttcgcgaactggaacgggtgcttaattttccgcaatcaaacttgtgccttaaacgtgagaaacaggacgaaagctgttcattaacgcaggcattaccatcggaactcaaggtgagcgccgacaatgtctcattaaccggtgcggtaagcctcgcatcaatgctgacggagatatttctcctgcaacaagcacagggaatgccggagccggggtggggaaggatcaccgattcacaccagtggaacaccttgctaagtttgcataacgcgcaattttatttgctacaacgcacgccagaggttgcccgcagccgcgccaccccgttattagatttgatcaagacagcgttgacgccccatccaccgcaaaaacaggcgtatggtgtgacattacccacttcagtgctgtttatcgccggacacgatactaatctggcaaatctcggcggcgcactggagctcaactggacgcttcccggtcagccggataacacgccgccaggtggtgaactggtgtttgaacgctggcgtcggctaagcgataacagccagtggattcaggtttcgctggtcttccagactttacagcagatgcgtgataaaacgccgctgtcattaaatacgccgcccggagaggtgaaactgaccctggcaggatgtgaagagcgaaatgcgcagggcatgtgttcgttggcaggttttacgcaaatcgtgaatgaagcacgcataccggcgtgcagtttgtaatgcataaaaaagagcattcagttacctgaatgctctgaggctgatgacaaacgaagaactgtctaatgcgtagaccggaaaaggcgttcacgccgcatccggccactttcagttttactctttctcggagtaactataaccgtaatagttatagccgtaactgtaagcggtgctggcgcgtttaatcacaccattgaggatagcgcctttaatattgacgcctgcctgttccagacgctgcattgacaaactcacctctttggcggtgttcaagccaaaacgcgcaaccagcaggctggtgccaacagaacgccccacgaccgcggcatcactcaccgccagcatcggcggcgtatcgacaatcaccagatcgtaatggtcgttcgcccattccagtaattgacgcatccgatcgcgcatcagcagttcagacgggttaggtggcacctgaccgcgagtaatcacatcaaagcctcctttgccaaaatgctggatcactttgttgagctcatctttacctgccagatattccgacaagccatgttcattactcacggtaaacaggttatgcgaataaccacggcgtaagtcggcatcaataaataacactttttgatcggactgggcgatcaccgctgccagagttgaactgacaaacgttttaccactgtctggcgtcgcaccggtgatcattagaatgttattctccgtctccatcatagcgaaatgcagactggttcgtagcgcacgtacggcttccacagcagaatccgccgggttatccaccgccaggaaggggatatttttagtacgatggcgctgctgattagaaaataaatttttcttacgcagacgggtgcgtttatccagccactcggacattgggatagtggcataaacgctgatgccgtgctcttccagttgttccggggcttctacaccacgacgcaacatcgcacgcgccagcacggcacccacagaaataaacaggccaagaataaaaccaagcaccacgttcaacgcttttttcggtttcactggctgcggctgagtgactgccgggtcgataatccgcacgttaccaatggcactggatttcgaaatactcaactcctgctggcggttaagtaattgcagatataccgcacggcccgcttctacgtcacgacttaaacgcaacacttcctgttgggtggaaggcattgccgatacccgcttattcaggcgtttgcgttcttgctccagcgtctggcgtttttccagcagcgcacgataagttgggtgatctttcttatacagctgggagatctctgcctcgcggaaggtcagctcattgagttgattatcaacgttcacaatctgctcaagaacggctttggcttccaggttaaggtcaaccgaatcgcgctgctggcgataaacgttgagtttttcttccgcttggtccagctcgctgcgcacttcaggtaactggcgctgtaagaattcaaggctttgtgaatcctgcgccgcctggcgagcgatattctgttgcaaatagttgttagcgatgctgttcagaatacgagtaatcaactggggatcatcaccagtcatggtaagttccagcatcccgctttctttactgcgttcgctaacggtaaaggtttcctgcaatgcgttaatcgcttccagttcggtacgctggctcaggacaaactgtgttcctggtttggccttaatgtccgcgatagtcagcgcaacgccatctttttccagacgctggccgaccataccattgacggtgaactcttcaccttccagtgtatagtggccgttttccccaaccgtgagtgtcagttgctgatcctgaccattcagttgtggaatatgcatccagctgatcgccagctcacctggtttttctttggttaatctcgcccagccgcgacccacaatcggaaaatacttctgctcaactatgtcgcgcagattcagttcagcaatggttttaccgagaatcatgcgcgattgcagcagttggatctccggtgcagacccgggcgatgagttagggatcatatcgctcaggccgctgagaatggcgttgccctgtttttgctcaacctggaccagagtatctgcctgataaattggtgtgcttaacagcgagtaagcgacagcgatcagcgtgaataacgcggtcacgctgataataaacttacggtgatcccataactcgccgaccagacgaagcagatcgatctcattttcctgagtgctgcctggtggcgtattcatatttttagttgtcatcgtattttataaactcaaattaccggctgaggcgcttcgcccattcctgactggcgcgctccaacataccgtagacatgttcaaatgcgtcctgacttttacgatagggatccgggatctctttctgttccagccattgcccaaacagcattgtcttcccgcggacctcgggagcaattgcggtaacctgagcaatatgttccgactccattgccagaatcagatcgtaatttcgtgccatctcagcagtgagcttacgtccggcatgtccttcaagagatacgccatgattagcggcaacatctgccgctgtcgcatctgcagggtgttttaccagaccatgaacacctgccgatttgacttttacgcccggcagacgtttacgcagcaagcgctcgccaatgggcgaacggcaaatgttgccggtacaaaccaccaggattgagttaaattttagttgggccatgtttgaatccaccgtgaagtctctgtcaggtcatgcaccccggaaatcgtcggtaccagcagagaaatcacacggttccaacgagccagcggcgcggtagtgacataaacaatgtcgtaaggttcaagctggaattccgttccgagtatcattgccgatgcgtccttcgcattcagctgataaatattggcgattttgccattctgcttgttttgcgttgcacgaataacaaaaatccccgtcgcatcagcgacatcctgattcataccctcagcgttacccagcgcttccgccagggtcataccgctgcggtccattttcagcgtgctctgtttacccacttcacccatcacgaagactttcagatcatcgttgcgcggaataaataaaatatcgcccgggtgcagcagtttgttctggcgcaagtcgccacgctgcatcagcgcatagaggttcactttggtctttacgccattctgggtgagcaccacgttgcgccagtctgcatctgcggtcagaccgcccgcggcgttaatcgcatccatgatggtcagaggaatattggtaatcggctgctgacccgatttgctgacttcgccggtgacgtacgctttttgcgatcggaacgccgcgacgctgacatcgacttgcgggctttcaatgactgaatcgagacgcgctgtaatctcgttgcgtacctgggtaagtgttttcccggccactttcaggcgaccaatataggggtagaaaatcgcaccatcggcgttaacccagttgccggtatcactggcgctacggtattgccctgcgggggtggttagttccgggtgatcccagaccgtaaccatcaacacatcaccaatcccgatacgatattcatagtttgcgatttgctgctccagctccgggttagcctgcgacataatcggtttggcgcgcaactgatcaatcaatcctggcgtgacgggatagatattgaccattttgtccaggtcatactgattgtcaggtagttcaatgacatccttgttactggtcgataaattctgaccaggaacaagggtacatgctgtcaaagacagaacagccaatgtcagtaccgaaaacttaaaaatgttctttttcattggtttatatttatcagtcaatgtaatgttatgaattacgtcaggttattgtccaaccggtacttctcgctctgccgtcattggatagagctggtatttgcgtgacagcatttgtccaccatcacgcgtcaatggtgtccacgaaaccaccgcgcggttgcggttaggtccaatggtcatcaagtcgaatggaatcgagatataaaaacctttactaaagccgccttcgccgtagtcatctttagatacgttactgattgccgcccatacccctaccgccacgccgctgtcaaagcgtttggcgacgtcgatcgttgcgcctttatcttttgccagatattgcccaacgctaagtttcatcagtacgccattgagcgtcggcgggttccagtaagccgtcacgaaacctgttggcgtggaataatcggtgaaacgcatcatgttgtcccagtcacgttgcttcacgtagttaacgtccacacccagcgcccagcaggcatctagcgggcgataaagcagctcggaaccgacaccggcgtacatcgtttccagataaccgccatacacctggccatagaaaccattgcctaagtcagcaaaatagttcgcctgcaagttgttgagataaacgtcattgcgaacgtagtcacggatatgcgtgcgcacgcggggcagggtagagtccgcgggcaacagcgaagacttaaacttgtcgtagttgttgtaaatattggtgaaaataccgccatcaagcagcaggtggtcggtaaaccagtagcgggcactggacatcagccccagctggaacatatagaaatcttccgggccgcccagcgactgtgaaagtgttgggttgaaagagtagctaaagcgatcttcacgaatacggtagccccgaccaaaggcagaaagatcttcagcttcaacacgttgttgttgcagtgcctctgattgaccaggcgctgtacctgccagctgtttgcgcaggctggctacgtcggtttcggtagtcaccatcgccatatgctcgcgcttttgcgtcacgctaatcttctcaacgccttgcggcaggttattcaccagaatccggttggcacgatcgaccgcttcacgagagtcacggtatttgtattgctgaccagacatatacagtgtcttatcgcgtagctgaatttctggcgcgtcaaagcccgcgttatacttcagggcggtaagttggtttgctaccgtggtgtactgcaatccttcagattcaggcgcaggttgatatgccggttttggcgtatcgcgcagggcagggcgcagatcgttgaaattggtccgtaacgtgaagccaaacatcaacgtgttaccgcgttcataactcaggttgagatctgcccagctggcagcgcgataaactgcgccgacgttgaaatggcttgcctgaggcagtttgccagcgaaatcattctggtaattgtttccatcgtattcgagtttcagacgcaggggattccacggcgtttgatactcaatgccgccaaagatggaagccgggccacgaaagatatcgctaaagctgatatcgcccgcatcgtgagactctgcgcgatgacaatatttatcgctcacccggcaaaacgggttggtaatattgcccgcattaccggcgtagccccatgccatcccgagggtgaaatcaaatggccccgcttgcttgctggccaccagatactcaccgtcaaacagacccgtaccagcaatatcacgtttaccaaacgccacttgcggtagccagtaaccttcttcccacaggcgaagtttaaaatcgaatgatttgtctttgtatgactgatcgccgctgaaatcttcccactggctatatttgcgtgtgcgcacatccgtataacgaatggtgccttccagccatgggaacagcgccacggaggtggagtagaaccggtattgatcgttatcccggtagttgacgctgaattcaccttccggtgcgatgcgcgcatttggcatctgcaacaatcctgtgccgccaaagtctgattgcgacgaacccagcggatccgggtaggttaatacttcagcatgacaggcactggagacggcaatggccaggcagcttaaaagataagaattcttcttcatcagtcaggaacacgttgcgttaaaacagacacaatctggtcatttaaatcagcatatttttcgggcagtacatgcgcagaaaagcccaaccaaagctggctgccaggcggtggttccacatgtcttttattccacagggcaacaggggcgacgacagtctcaccctcaggcgtaatcaccataacgttattcttgtccgcgcctgcaaggcgggggtgatcttgcagataatcggtaacgctacggcctgcctgccagggcaattgcccggccccagaaaccgcacccagcagagtaatagtcaccggacgctgtacggtatagagcgtatagtccccgaccaacgggggattgctgttctcatccactcgtacaaaatcagggtccagtttgaccggtaagcgaccagtgatattgagattgagtaactgctggcgcacggatttaatcgttgccgccacatcgtcgtcagcttctgcttcccaggaagcaagctgtgccatgacatgttggtagtctttaagcgctttagctttcgccgcagagtcggtcagcaaggcaccaggccaccagaggcgatcgcgcagttgcggttgtgtcaccaactggacaacattttccacggggccaacggaaagtgtctgttgttcgccaggcagataaatagtcaccgttccttgcgcaaaggcatggggtgtcattacgtaaagtacgctggcaatgaaatacgactgtaatttattcatggtgcgggtttaagaaacgtcatttctacgggaataacccctgcgcctaacatttgccgactttgacgaacctggccagtagccgaatcgacccagaatgtgttttgccactgtttttctggccgcgtggaagtcacctcttcctgccagacattacacagcacattgcgacccgcaatattcagcgtctctaatccagcaaaggaaaaagtagaactcagggtcgcagagcgaaaatggttgtcttcactccagagaatatcgcgcgtccagcggctgccatcttttattgccagcgcgttacgcagagggtcctgcccggaatttgtcacttccagcagattattattaagtttgacggtttttaaaagacgtccattgtgggtaaccagcatggcgttatcctgggataaccatttgctttgttcttgttctatatatcccagtaccacaaagattcgttgcccttcattaaggcgtaaatacatagtggaataaggcaacgcctggatctgctgatccgctacggtgatatcctgattatcgaaaaggctggcgcgaaatgtatcgaccatactttgctggctgtgcgtacatcccgcaagaaatagtgcgaaaatcgataaaataagagggcgcacctttaatccttgaaaggttaattaaaaaaatgcaaatctctaaagcccggtacgaatatcgcaaccgggtatcatttaactttaatttcgacgcgttaaagcggtattagcgtgtagtggacgtggtggttgaggtgttatgagaaccgccatcgccactgtcatttgctgcaacaactgccaacgtcgccacaccaacagccgttgccacaccgacaactgtcgccgtgccgacagcgccagcagccacgccaccagtggtagtagcagtcgtggttgcgccggtagtggtcgttgtggtgccagtagtacccgtcgttgcctcggtcccgtttgttgcttcaggggcagcaaacgcagctggcgtcgtcaacatgaaggccataaggattgcagaaagcttgtgtttcataacttttcctttattcatcgcatggacaatacgtacgcttgagatcaggattgtctactttgagtataacatccttgtgaaatctccctttcctcataccgcttgcactatatactgcgggtaggaaaggcgcgcagagggaaatataagattgttaactatccccctctggaaatacgacttgtgagtataagataaatcttagcaaaatacaaattaaagataaggaaattgttacgaaagctattaattattgttggtaatatagtttcaagtggtactataactggctgttaaatggcatttataactattaggtgcagagatattcgcttaaatggattagtttctttgtggaaaagtaactgatgttataatgtgtgatgttgactattgcactattccaataaaaccagtcagctttaaacaagcagcgtcatattaagagagataaacatttgccgctgttggtcctcgcaggccatttacgcggcaaaattccacacgtaatcctggtataagcacttctgcgtcgcggggagtgaatgcggaaatatggacctgaacttctttacgaccgtcggaggggataatgaatcctttgccgcttttgcgatcaaaggttttgacaattcctgtcattttacgggacaaacaaattccttactgaaaatactgcgctgcactatacggggttaataaaataaagccagcgatatttaagaccgccggacggctaaaataaaatttgcttaatctcaattatcatgcgttaatagctgcgtcggtttgaaagacagacagcatacaaagtagtttactaaagcagttctcattatcaggcattatccccttcttttgagtctctctcctgaacactaagtagtttctgtattaaagccctgtttgccgaaaggcccaaaatgaaggaagtaaaatatgtctaataaaatgactggtttagtaaaatggtttaacgcagataaaggttttggctttatcactcctgatgatggcagcaaagacgttttcgtccatttcaccgccatccagagcaatgaattccgcacgctgaacgaaaatcagaaagttgaattttctattgagcaggggcaacgtggccccgcggcagcgaacgttgttacgctctaaggttgccattattactcaacatctccatttccgctgtccatgttgtcatggttcacagtaccgcacatcggcattcgatgtgacggagcgaaaccctttgggcgctaagtgtattttttgtaaatcgacgatgatcacctttgataacgtcgcgctgcaaatacgcactgaccatgcgccgctggatttcacaaaataatatcaggctccctcgtggagccttttttatatctgccttatttttcttcaacgctgtatgtatagtaagcgataacctgttgattattgaatctttcggggagatggcttataacatttcttacctgaccagggtaccgggaaccaacaccttactggcgtgttgctgtcttttaagaccagaagaggttaacagtgaatattgaagagttaaaaaaacaagccgaaacggaaatcgccgactttatcgcgcaaaaaatcgccgagctgaacaagaatacagggaaagaagtctctgaaattcgcttcaccgcacgagaaaaaatgaccgggcttgaaagttatgatgtcaaaatcaaaataatgtgattttgtgaacatcaccccgtgcgaggtgatgttccgcttgttgctaatttagtgaccaatcattggcgcttgtggaattaagcgtcggtacaattcctccggcaccgggctttgccatactcccgcatacattgcgtaaccaatcaccgcaaacataatccccagaaccagtagcgtcattaaccagccagacaacgcaaaggcttttttatttgccgcaggtttttgcagtgaaaaggtcaatgttgaggctaccggacatgactctacgcaagtcatacagccggtacattccactgttcgtacctgaattaatttatcgaccgggatccgtgatgggcaattttttgcgcatttgccacagtcgatacaactttcggcattgcgacgaatcttaaacggcgacaatagcgaaaccacgcccatcagcgcgccatatgggcaaagataacgacaccaggcatggcgaataaacaggctggcaatcagcaaaacggtcacgctgattaatgtcgcggtccccatatgacgaaagaaatcgagcattttaacgtccatcaccacgctgtagggcgacaacataaaatagtgaatcgcctgagcgggcatcaataacgcgatatagataaaaaaactcaacagcaaatacttcacgccgcgcagaggaatatccagccagcggggaaggacacattgccgaccaaacagtttgttaccgagatcgccgattaattcagaaagcgtaccaaccgggcataaccatgagcaaaaggcctttttgagtaatagactgatgacgataaaagcgaccaataacagcatcgcggcggcgtggacggacggtaactgacctgttacaaggctatatttcagattcatcagcccggcaatcggtagccagccttcgatacctcccggtctggcgacaaatgtcgtgctacttgccgtttcgtaatagcgcacccaataccagaacgtgatggcaatataaatattcattgccaacagtaataattgcgtcgctttacgccaggtcgtggcattacgccagtcattccacggtaatttgccgcccgtcgtgcctggccgccgctgccagcgggttcttttattctctgccatgattttgccagtccgttaagttgtataccaaatgccactattctagttgttcttaactggctgatattgattcaaatcgcgttcaggtctttcttatgcaaccatgcttccagagcggcaacactgcgtgtaatttcttcgtgtggaaggggggcagataatggctgctgctccagttgtgcgcatagctggctggcgatatgcattcccagactcgagcaactgctttttagctgatgcgcggcacgctttattttctcgctatcctgactggcgcgggcaatgtcgatttcatcgagaagcggcagggcatgttgtgtaaataataccagccattcgtggatcttctccgtccccattaactgagcatcttcattgagttgcgatacatccagcgattgatcattattgacttgcagttggagatagtgcgccagtaactgaccgagcacttcacgcggcaccggtttagggataatcccgcggaataatgaactggtacgctggcgcagcgtttcgtcaatgacatgggcgctaaagccaatcaaaaccagcgacggatattgctgtgccagttgtcgggcaagcgtaatgccgtcgatatccggcagatcaaaatccaccagtgcggcagcaaacggttcgctattttgcagtgtctctaaagcctgcgcggcattgccaacagcaacaatctgcgcaccactggttttcagcatctcaatggtaattcgctgggttagcgggttatcttcaattaacagcaaacgtaaaccgtcaagacgcaccgcctgattgactgtttttggcacgggtgccgtggcaacacgtaacggcaagcgtaaacaaaaacagcttccaacctccggcgtgctggtggcgctcagttcgccgcccatcgcctgggccagacggctactgatagtcagtcccagcccggtgccgccgcgtttgccgcttacctgcacaaatggctggaagatttctgccagtttcgcgggatcaataccgcagccgctgtcttccacttcgaccagccattgctcgccatcagtgcgactacgcaggataatgtacccttcgtcagtaaaacgcagggcgttgctcaacaggttggttataacctgacgaatacgtcgtggatcgcccattaacgcgcacggcatatcatcggcaattgccgttgccaggcgaatcgggcgacctttcacccgtccgctcattaattgcagggtactttccagcagcgggcgcggttcaaagggctcatcgctgaccgaaacattcttgccacctgcttcgatagcggaataatcgagaatatcgttgaggatggtcagcaacgattcaccagagtcagtaattgcccgcaaatcatcacgctgggcgttaagtgcggggttatctgccagcagttgagcagtgccgagaataccgtacagcggtgtgcggatctcatggctcatcgccgccagaaacgccgattttgcctggctggctttttctgcttccgcccgtgcctgtcggtgttctatcaccagttcctgcaattcagctgtacgcgctttgacctgcgccgccagctgttcgcggtggcgattcagtgcatgaacattgctgcgaaacgcatccatcagccgcccgatggtatccagctcccgtacgccagcggtttccgggaaaggggagtcaatatcaccgtccagcagccgttgcagcgcctgcgtttgttcggcaagtggacgcgtgactgagcgataaaccacgcgccagaggatcagaatcagtgcgcaaagtgaaaccatccccagcaataacaggctgtattgcccgcgtgcactcgctttttccagatgcgccagtccgtgctgattacgcagctcaatggtgtcgaccagctgactgacttcgctactaaactgcgcgaactgggcgatgttattttgtgcgagagtttgtaggtgattgctgatttcactgtcctgctgatacagcgccagcaaatcgctatattggctaacggtagttaacgttgttgcgacctgcgcacgaacacccggatcttcaatgcgtatttgccgacgttgcagaattttcaccgcattattgagctgcttttccagcgttggtgcatttttctggatctgctccagccccagattcatcaccatttgctgcacccgcagagcgctaaggcgcagttcattcatctggttaacatactcaagatcgatatcaatcagccgatcgagtgcactttcagcagcctgacgctgatcttgttcgatcaaatcgtaaatcccggcctgggtcgctccagcggaagttgtcgcattattcgcctgaccttgcgccaggcgtgcgatctcatcggcggcagcgactatctgctgactgagttgctgttgttgctggcgcagttgcaaacgctgccccaccagttccccttgctgacgtaacgaacgggagatctcctgctcctgttgttcaatagcggtggtatcaaaaccttgttcccgtaacgcttgcagcaacgcattaatcttcaggctttgtgcggtgagcattcgcccctgcgcctgccacatcttttcgttatcggcactggtcaggttctgcgcggcgaaaagttcccaggcgctggcttcgctcaactggcgcgccatattcatggtaggaatcaatgcctgagtgttgtctttttccacctggctgataaagcgcaggttgtaccatcccaccagggtactggtcagggttaacagcgccatcagggcaaagcccatccagagtcttcgggtcagggttaaattcacggtcggtgcactttaggtgaaaaaggttgagtcgcaaagcggaatgcatctagcataaagccttattattgatgaggctatcatgcgcgtactgctatttttacttctttcccttttcatgttgccggcattttcggctgataacctgttgcgctggcatgatgcgcagcatttcacggtgcaagcctctacgccgcttaaagccaaacgcgcatggaaactgtgcgcgctttatcccagcctgaaagattcatattggttatcgttgaactatggtatgcaggaggctgctcgccgctacggtgtggatttaaaagtgctggaggcaggcggctacagccagttggctacccagcaagcacaaatcgaccagtgtaaacagtggggcgcagaggccattttgctcggtagtagcacgacctcatttcccgacctgcaaaagcaggtagcaagtctgccggtgatcgaactggtaaatgctattgatgctccccaggtgaaaagccgcgttggtgtgccctggtttcagatgggctatcaaccggggcgatatctggtgcaatgggcgcacggtaaaccactgaatgtgctgttgatgcccggacccgataacgccgggggcagtaaggagatggtcgagggttttcgcgcagccattgccggaagcccggtgcgtattgttgatattgcgcttggtgataacgatattgaaatccagcgtaacctgttgcaggagatgctggaacgccatccagaaatcgacgtcgttgccggaacggccattgcggcagaggcggcaatgggggaagggcgtaacctgaaaacgccgcttaccgtggtgtcgttttatctttcacatcaggtgtatcgcgggctgaagcggggaagagtgattatggctgccagcgatcaaatggtctggcagggggaactggcggttgagcaggccatcaggcaattacaggggcaatcggtttctgataatgtcagcccaccgattttagttctgacgccgaaaaatgccgaccgtgaacatattcgccgctcgctgtcaccagggggatttcgtccggtctatttttatcagcacacatcagcggctaagaaataaccttcaccatgttgcgtcaccagtaaatccgcgctgagtttatgacgtaaacgacgaattaacacatcgacggtgcgcaggtcagggttttccacccgacgcgcagaaagcatacgtagcagacgttcacggctgagaatttcgcccggattcgtcacaaatgccaccaacatttcatactctgcgcgggtcagtttaatcggctcgccatcccgctccagcgtatggcgcgacacattcaggcaataaccggcaaagcgatagcagttgtcctgagtgtgcggttgagcttgtcgcgcgaggtcgattcgccagagcagatttttcacccgtactaccagttcgcgcagttccagcggtttggtgacgtaatcgtctgcgcccatttccagcccaacaatacggtcaatccgatcgctgcgtccggtaaccagaataatccccaccgttgagcgttctcgcagggcgcgggttaacatcaggccattttcatcgggtaagttgatatccagcagaattaaatctaccgactgattctgcataatttcccgtagcccggcaccgctcgccgtaacggaaacggtatacccctcctgagtgaagtaggattgtaatcgcgcctgggtaaccggctcatcttcaacaataacaatgtgatgtggcatcagagggttttactcattctgttcatatctgttcatattctgccgtaagccgttcatcctgaccagtgccgctgttcatatttgctcattaagatcgcttcactaaaccataattctacaggggttattatgcggaaactctggaacgcgctacgccgacccagtgctcgttggtcggtactggcgctggtcgcaattgggattgtgattggcattgcgctgattgtattgccacacgttgggatcaaagtcaccagcacaaccgaattttgtgtcagttgccacagtatgcaaccggtgtatgaagaatataaacagtcggtgcatttccagaacgcctccggcgtgcgagctgaatgccatgactgtcatatcccgccggatattccaggcatggtgaagcgcaaactggaagcgagcaatgatatctaccagacctttattgctcactccattgatacacctgaaaaattcgaagccaaacgcgcggaacttgccgagcgtgaatgggcgcgaatgaaagaaaacaactcggcaacctgccgctcctgccataactacgatgcgatggatcatgcgaagcagcatcctgaagcagcacgtcagatgaaggtggcagcgaaagataatcaatcctgcatcgactgtcataaaggtattgcccaccagttaccggatatgagtagcggcttccgtaagcagttcgatgagctgcgcgccagtgctaatgacagtggtgacacgctgtactctattgatattaagccaatttatgcggcgaaaggcgataaagaagcctctggttctctgctgcctgcttcggaagtgaaagtccttaaacgtgacggcgactggctgcaaattgaaattaccggctggacggaaagcgccggacgtcagcgtgtactcacccaattcccaggtaaacgcatctttgttgcctcgattcgtggtgatgtgcagcagcaggtaaaaacgctggagaaaaccaccgttgccgacaccaataccgagtggagcaagttgcaggccactgcgtggatgaagaaaggcgacatggtgaacgatatcaaaccgatctgggcttatgcggattcgttgtacaacggcacctgtaaccagtgccacggcgcaccggaaatcgcccactttgacgctaacggttggatcggcacgctcaacggcatgattggctttaccagtctcgataaacgtgaagaacgcaccttgttgaaatatctgcaaatgaatgcgtctgacaccgcaggtaaggctcacggcgataagaaggaagaaaaataatgaacaataacgatctctttcaggcatcacgtcggcgttttctggcacaactcggcggcttaaccgtcgccgggatgctggggccgtcattgttaacgccgcgacgtgcgactgcggcgcaagcggcgactgacgctgtcatctcgaaagagggcattcttaccgggtcgcactggggggctatccgcgcgacggtgaaggatggtcgctttgtggcggcaaaaccgttcgaactggataaatatccgtcgaaaatgattgccggattgccggatcacgtacacaacgcggcgcgtattcgttatccgatggtacgcgtggactggctgcgtaagcgccatctcagcgatacctcccagcgcggtgataaccgttttgtgcgcgtgagctgggatgaagccctcgacatgttctatgaagaactggaacgcgtgcagaaaactcacgggccgagtgccttgctgaccgccagtggttggcaatcgacggggatgttccataacgcttcggggatgctggcgaaagctattgccttgcatggtaatagcgttggtacgggcggagattactctaccggtgctgcgcaggtgatcctgccgcgcgtagtcggttcgatggaagtgtatgaacagcaaacctcctggccgctggtattgcagaacagcaaaaccattgtgctgtggggctccgatttgctgaaaaaccagcaagcgaactggtggtgcccggatcacgatgtttatgaatattacgcgcagctaaaagcgaaagtcgccgccggtgaaattgaggtcatcagcatcgatccggttgtcacatccacccatgagtatctggggcgcgagcatgtgaagcacattgcggttaacccgcaaactgacgtgccgctgcaactggcgctggcacatacgctgtacagtgaaaacctgtacgacaaaaacttccttgctaactactgtgtgggttttgagcagttcctgccgtatctgctgggtgagaaagacggtcagccgaaagatgccgcatgggctgaaaaactgaccggcattgatgccgaaaccattcgtgggctggcgcggcagatggcggcgaacagaacgcaaattattgctggctggtgcgtgcagcgtatgcagcacggtgaacagtgggcgtggatgattgtggttctggcggcgatgctggggcaaattggcctgccaggtggtggttttggttttggctggcactacaacggcgcaggcacgccggggcgtaaaggcgttattctgagtggtttctccggctctacgtcgattccgcctgttcacgacaacagtgactacaaaggctacagcagcactattccgattgcccgttttatcgatgcgatcctcgaaccggggaaagtgatcaactggaacggtaaatcggtaaaactgccgccgctgaaaatgtgtatttttgccggaactaacccattccatcgccatcagcagatcaaccgcattattgaaggcttgcgcaagctggaaacggttatcgccatagataaccagtggacctcaacctgccgctttgccgatatcgtactgcctgcgaccacgcagtttgagcgtaacgatctcgaccagtacggcaatcactccaaccgtggcattatcgccatgaaacaggtggtgccgccgcagttcgaggcgcgcaacgacttcgatattttccgcgagctgtgccgtcgctttaatcgcgaagaagcctttaccgaagggctggacgaaatgggctggctgaaacgcatctggcaggaaggtgtacagcaaggcaaaggacgcggcgttcatctgccagcgtttgatgacttctggaataacaaagagtacgtcgagtttgaccatccgcagatgtttgttcgccaccaggcattccgcgaagatccggatctcgaaccgctgggcacgccgagtggcctgattgagatctactcgaaaactatcgccgatatgaactacgacgattgtcaggggcatccgatgtggtttgagaaaatcgaacgctcccacggtgggcctggctcgcaaaagtatccgttgcatctgcaatctgtgcatccggatttccgacttcactcgcagttatgtgagtcggaaacgctgcgtcagcaatatacggtagcgggtaaagagccagtattcattaacccgcaggatgccagcgcgcgcggtattcgtaacggtgatgtggtacgcgtctttaacgctcgcggtcaggtgttggcaggggcagtggtttctgaccgctatgcacccggcgtggcacgaattcacgaaggggcatggtacgatccagataaaggcggcgagcctggtgcgctgtgcaaatacggtaaccccaacgtgttgaccatcgacatcggtacatcgcagctggcgcaggcgaccagtgcgcacactacgctggtggaaattgagaagtacaacggaacagtggagcaggtgacggcgtttaacggccccgtggagatggtggcgcagtgcgaatatgttcccgcgtcgcaggtgaaatcatgaccacgctgacagcacaacagattgcctgtgtttacgcctggctagcgcagttgttctcccgtgagctggacgatgaacaactgacgcaaatcgccagtgcgcagatggctgaatggttttcgttgctgaaaagcgaaccgccgctcactgcggcggtgaacgagctggaaaaccgtattgccacgctgacagtacgtgacgatgcccgtctggaactggccgcggacttttgcggcctgtttctgatgaccgacaaacaagcggcgctgccgtatgcatcggcctacaaacaggacgagcaagagattaaacgcttgttagttgaggcagggatggaaaccagcggcaatttcaacgaaccggcagatcatctggcgatctatctcgaattgctcagccatctgcatttttcgctgggagaggggaccgttcctgcgcgaagaatcgacagtttgcggcaaaaaacactgacggcgctgtggcaatggttaccagagtttgttgcgcgttgtcgtcagtatgacagctttggtttttacgcggcactaagccagttattgctggtgttagtggagtgcgaccaccaaaacagataacgtcgtttgtgcgcctgaaaagacgcgtttagcgtcgcatcaggcattatggcgcagttgccggatgcggcgtgaacgtcttatccggcccacaggaactgtaatctttgtagaccggttaagatgcgtcatcgcatccggcaaacacacatcacggatgagctacaaaccgggaaagccgctggcgcagcaggcggttttcctgcttcaggtgcgcaatatcatccattaacgtcagcgccaccgcgatccccggccagtccagagccagttcatgacgcaggcgtaccgcgcgttgcaccacaatggcggcatggtcgtcaaatacccaggttgtttcctggatctcacgcggttcaaccacccccaaaccgacaatttcattcaactcctcttcagagatgccggtatgcaggcaaaattcggtaatagtaaaagtcaccgtaacattagccattatgctttcccccaatctttacgtggatcaaaagacgactgggcgtctgccagttgctgccacagcgcggcagtgttttcatccggtttcggcggcatcacgattttcagtaccgcatacagatcgccggtctgttttttgctcaccagacctttgcctttaacgcgcaatcgttgcccggcctggctgcctggcgggatagtcagcaaaatgctttctttcagtgttggaacggtgactttagcacccagcgccgcttcccacgggctaaccggcaccacaatttccagatcctggccgacaatatcaaacagcggatgtggcgcaatatgaatcaccagccacaaatcgccatttggaccgccgttttcgcccggcgtcccctggcctttcagacggatgcgttgaccattgccgacgcccgccgggatcttcacattcagcgttttcggaatttcctgttcgatcatgccaaaggcgttataaaccggcaggttatagctgatggtacgcttatgctcagtaagcgtttcttcgaggaataccgccacttcgatttcaatatcgtggccgcgtgtggcggggcgttgacggctctggcgggcatgctgaccgaaaattgacgagaagatatcgtcaaaatcttcggcgttaaaactctgaccgtcgccatggtggaactgacggttaaattgcggatcgttgcgatgttgccacatctgatcatactcagcgcgacgttgttcatcacttaacacttcccaggcttcagcgacctctttgaagcgggcttcggcatccggttctttgctgacatcaggatggtatttgcgggcaagtcgacgataggcggtcttgattgtcttgagatcgtccgtcggtttcacgcccatgatggcgtaataatcctttaattccatagcgttatctcgcgtaaatcaacacaaattgaaggaacccctgtaaggtaactcctataagtgtagggtaatcctcaaaatttcatatgccaacacagaatatgttattgaaatcatcgcggagaggaggtcgccatcaagatgggttgctgaacatattttaaacaggtgaaaaagggtgagcgatttttgatagttgaaccaggcactttaagtttaactagggcgtcattatttattaaattttatagacgctatatatgggtagtaatatacatggaattagttgcactgcaaataattatttgaaacaggcctggaacgatataaaaaatgagtacgaaaaaaaatcaaacatattcaatcacgctttttgaaaacacactggtgtgttttatgcggttatacaatgaactcagacgtaaagtaaatgaagaggatactccatgtctggaatgtgaatcactagaaaaagaatttgaggaaatgcagaatgataatgatctatcattatttatgagaacattgcgtactaatgatacacaaatttattcaggggtttcaggaggtattacatatactatacaatatgttcgagatattgatattgttagagtgtccttgccgggcagagcttcagagtctatcacagattttaaaggttattattggtataactttatggagtatattgaaaacattaatgcgtgtgatgatgttttttctgagtattgttttgatgatgaaaatataagtgtccagccagagcggataaatacgccgggaatatctgatttggattctgacattgatttgtctggtatatcttttattcagcgtgaaactaaccaggcattaggattaaaatatgctcctgtagatggcgatggatattgtctgttaagagctatactggttttaaaacaacatgattattcatgggcgctggtcagttataagatgcaaaaggaagtttacaacgaattcattaaaatggttgataaaaaaacgatcgaggctcttgttgatacggcattctataatctcagggaagatgtaaagacgttatttggcgttgatctacaatctgacaaccaaattcaggggcagagtagtcttatgtcatggagctttctgttttttaaaaaacaattcattgatagttgcttgaataacgaaaaatgtatcctgcatttacccgagtttatatttaatgataacaagaacttgcttgctttagataccgacacgtcggataggattaaagcggtgaagaattttcttgctgttctttcagatagcatttgctcattatttattgttaatagtaatgtggcatcaatctccttggggaatgaatccttttcaacagatgaagatcttgagtatggttatttaatgaacactggcaatcattatgacgtttacctccctcctgaactttttgctcaggcttacaagttaaacaataaggaaatgaatgcgcaactcgactatttaaatcgttatgcaatttaatggcaaaggcatatgctaaaaaccattgttattagtctcacacttttttattggtaaatattgtctctgtattggtaacgccgcagatattctgtttagccacaggtgcaattatcagcggcgtacgcgaggcaggggctaatcaggcatagtttgcgtcaaaccttgcctgtttttgaagatgtatatagaaaaacaggcgttcaacaagccattttgcgaacctgttcccggaaaaaagtcatatttctgtcacactctttagtgattgataacaaaagaggtgccaggaatgaacaaaacgctaatcgccgcagctgtggcagggatagttttactcgcttcaaacgctcaggcacaaaccgtaccggaaggctatcagctacagcaagtgctcatgatgagccgccataacttacgtgcgccgctggcgaacaatggcagtgtgctggagcagtcgacgccgaataaatggccagaatgggacgtccccggtgggcaactcaccaccaaaggtggcgtgctcgaagtgtatatgggccattacatgcgtgaatggctggcagagcaggggatggtgaaatcgggggaatgcccgccgccgtacaccgtttatgcctatgccaatagtctgcaacgtaccgttgcgaccgcacagttctttattaccggcgcattcccggggtgtgatattcctgtgcatcaccaggaaaaaatgggcactatggacccaacctttaacccggtgatcaccgatgattccgccgcattcagtgaacaggcggtggcggcaatggagaaagagctcagcaaactccagcttaccgacagctaccagctactggaaaaaatcgttaactataaagattcccctgcctgtaaagagaaacaacagtgttcgctggtggatggcaaaaatacctttagcgccaagtatcaacaagaaccaggtgtttccgggccgctgaaagtcggcaactcgctggtagatgcgtttactttgcaatattacgaaggttttccgatggatcaggtggcctggggagaaatcaaatctgaccagcagtggaaggtgttgtcgaagcttaaaaacggctaccaggacagcctgtttacctcaccggaagtggcgcgcaatgttgcgaaaccgctggtcagttatatcgacaaagctctggtcaccgatcgcaccagcgcaccgaaaattacagtgttggttgggcacgactccaacattgcctctctgttaacggcgctggatttcaaaccgtatcagttgcatgaccagaacgaacgcacgccgattggcggcaaaatcgttttccagcgttggcatgacagcaaagccaatcgcgatttgatgaaaattgaatatgtgtatcagagtgcggaacagttacgtaatgccgatgcgttaaccctgcaggcacctgcgcagcgtgtgacgctggaattaagcggttgcccgatagacgctgatggtttctgcccgatggataagtttgatagcgtgttgaatgaagcggtgaaataacagaaaactcccccgcgagaagcgggggagtcgctggttaaacgtttttacgttcgatggtctgttcgccccaaaaaagcgaatctttatcggtcttagcaaaggctttgactaacacttcatcactaccttcttcccaaatcttttccgccattttttcgtcgtacccggcgacttcgaaaatggcctcggctatttccggcgacgtattgcgcagagatgcccattcaccgacgtgatgagctttcgcttcttgagttggcatgcgtatcctcctgttgaagattagccgttaagtttaactgccagacctgcgacatattccccttgataacgagcaatagacagttcttcctggctgggctggcgtgaaccgtcaccgcctgcgatggtggttgcgccgtacggcgtaccgccgcgaacctgtgaaacgtcaaataattcctgcgctgcgtagccaatagggacaattaccatgccgtgatgcgcaagggtcgtccaggtggatgtgatggtttgttcctgaccgccgccagtaccggtggaactaaagacgctcgccagttttccgtatagtgcgccggaagcccacaggccgcccgtctggtcgaggaaggtacgcatttgaccggacatgttgccaaagcgggtaggtgtaccaaaaataatggcgtcgtaatcggccagttcttgcggggttgcaaccggtgcagtttgcgttttaccgcctgctttttcaaataattgcggcggcatggtttccggtacacgcttaacgacaacttcagcgccatccactttgcttgcaccctcagcgactgcgcgtgccatcgtttcaatatgtccgtacatggaataataaagcaccagaactttagccatttctaaccactcctcgtgttatctctattccgtagcgattcgctaccacttatttaaagataagacgtccttttcagagtgcaaatttcacaaccacttatttgatttataacaactttcacaagcacgtaattttgtcgcaaaatgacacatttttatctcatcgcgtttttttaatcataagagcggcttatggataattattggagatgatatctattctcgctaagaagctgttgcaggatattaccaaacgcgggtctgcccgcgtcagttcactaagcttagtcccacgtagcgaaaatatggcagccgccatacgccgcgttaattctatgcaatatgatgtctatacccagacggaggtcagtaatggcaaaccatcgaggcggttccggcaattttgcagaagaccgcgaaagagcatcagaagcaggtaaaaaaggtggacagcacagcgggggtaatttcaagaatgacccgcagcgcgcatctgaagcaggtaaaaaaggtggtaagagcagtcacggcaaaagcgacaactagccgggctaatcaatgacgaatgcatttttgtctgtagctcgtcaaaaagccatcaccgccggttacccggtggttgatactgatgacaaatgtaagcttgcctgatgcgcgatgcttatcaggcctaccagaagattgcaatatattgaatttgcactgttttgtaggccggataaggcgtttacgccgcatccggcatgaacaatgcgtacgttgtcaacaatctgcaccgccggtaaccccggcggttttctgtttatggctcctgatgaacaacttctggcggtggaacgtcaaccaactttctgcttaacaacgcattgagtaaaatcgcgccaaaggttgctgtaccaatccctcccaacgtaaaaccgcccagcgtgagagcaaaatcacccgcgcccagcactaaggttactgcgaccataatcaaattaccgttctggcttaaatcgacacggttttgtacccatatccttgcgcctgcgacggcaatcagcccgaacacaacaattgatgcaccaccaataaccgcggccggaatggtatgaatcagcgcaccaaatttcggtgaaaagcccaacagcatggcgatgacggcagcagcaacaaacaccagcgtcgagtagactttggtcacggccatcacaccgatattttcagcataggtggtcacgccgctaccgccgacagagccggaaagcatcgttgccagaccatcgcctacgaatgcccgccccatatacgggtccatattgcgtccggtcatcccggcgactgccttgagatgacctaagttttccgccaccagaatcaccgccacgggcgcaatcagcatcattgcctgaccattaaaagcaggagtggaaaaatgtggcagaccgaaccaggcagcatggctgacgagagtaaaatcgacggcttttcccagccctaaaacgttggtcatcacgccatacagcagacaggcgacaattaatcctacgagaatcaataaccgctggatcatgccacgggtaaacaccgccaccagcccaatacacagcaccgtcattaccgccatccagctatcaaaggccgaagccgatacacttttcactgcgataggcgctaagttcaggccaatcgccatcaccaccgcacccgtcaccaccggcggcatcagtcgttcaatccagcgcgtaccgattttcatcaccaccaggccaatgacggtataaaccagcccacaggcgataatcccgcccagcgcaatgctgatattcgggttaatgccctgaccgttaaagcccgtcgcggcgatcaccacgccgacaaaagccgcgctggagccgagataactggggacgcgcccgccggtaataaagaaaaacagtaacgtgccgatccccgacattaaaatggaaagattgggatccagccccatcagaatcggcattaacaccgtcgcgccaaacatcgccaccgcgtgttgaacgcccattactgccgtctgagcaaacggcaatcgttcatccggcgcgaccacgccgctctctgtagaggtcgattttaactgccagtgaggaaaaccgaacattgccatcagctgtctccttaaggaggttaacaagcagggcgcatcagcgcgtgataactgcgatcgaaccacaccagcccgtagggtgtggtgtgacgatgaatcgcttcgatggcgcaaaacagaatgtcgtgggtgccgacgctcaccacctggctgatacggcagtcaaacgaaaccagagcctcttccagttgcgggcatccggtcacccccgtctgccagcgggcggcggcaaagcggtgttccatgggcgttttgccgccaaaaaggtttgaaagcggctcctgcccggcgctaagtgtatttacacacagcgttcgattttcattgaatgccggccagacggacgccccacgattcaggcacaccagtaatgtgggcggcgtatcggtcacactgcagacggcgctggcggtgaacccggcgcgcccggctggaccgtccgtggtgataatattgaccgccgcgcccatgcaggacatcgcatcgcgaaaagtttgttgatcgacaatgttcatagtttgctccttacaacagcccgcaggcttcttcaaaggacagacgtggcaggcgcgcataaagcttgctgctatcgccatagccgatattaatcagcagattgctcttcagcgtgctgcccgtaaaaaaggcgtcgtccacgtgttgacggtcaaagcccgacatcgggccggtatccagtcccagcgcccggcaggcgacgatcagataggccgcctgcatggaactgttgcgaaacgctgtttcttcggcaagttgtgggctggaggtaaaccaactgcgggcatcaccgtggggaaacagtagtggtaaccgttcataaaattcactgtcccaggcgacgatagcggtgacgggcgcggtcagggttttttgcagattgccgctggaaagtgccgggcgcagacgttcttttccttctgccgtgcgggtaaacacgatccgtgccggagaacagttagctgatgtcggcccccatttcatcagggcataaatctcccgtaacgtctcatcgctgacgggggtctcccgccagccgttgtgagtgcgggcatcggtgaacagggtgctaagcgcacctgggctaacggcttcgttcatagcaattccttacagggcggcttcacggtgatgtaacaggctggcaagcccgttgagtaacagagcattaaacgtttcgggatcggtcacgttgcaggcgtgtccgccatagggcatcaccattttctggctatcgggcagggcggcatgaagttcactggaacatgctgttggcaccagcagatcatcactggcgcagatgatttgcaccgggcagcggatgcgatccgcatggtgactaaagtcagcgcgtttgagggcgttaagtcgacgcagtaaattatttttgccctgaaaatgcgccagtgccagcgcgtcttctgcctccaggcgaggtgcgcgggccgccatccagtcggcgggatagaggaacaacggctgcgcttccacccatgcctgcgcgccgccgctatacagtaatcgttcgcgaacctgaaaacagcggcgcgtatgggcgtttattcgtagccagccgttaacgctgatcagcacagttaccgacgcgggataatccagcgccagctgcattcccaccagcgcaccgagcgcatggccgaccactgcgtaatgctcaatccctgcggctaccagcgcctgatgcagttccgctgccatctgggcgatactgtaatcttctgccagcgtgtcgggattattgccggtgccgcgctggtcgtaacagactacctgatactcctgctccagcaccgccagttgcggtaaccagtaactgccgctacccccaagacccgaaatcaacaccactacgggcgcatcagcataagggggaggtgagagtgaaagtttcatcgcggcctcacttggcgatatgcgcaattgtggcgatttccaccagcgcgtcaggttttaccagtccgcactgaatgcagaatcgcgccggtttatcacccggaaaaaactcggcgtagatttcgttaatcgcggcgtaatttttccagtcggtaataaagatgctgttgaaggtcacatccgccatcgtgccacccgccgtctcgatcaccttgcggatagtttccagaacgtggcgggtttgcgcctttgggtcatcggcaaacagcgcgttattatgttgatcaaaagccagcgtaccggagacatacaccacgccatcagccagcgtgccgggaacgaagggggccagcggtgcgctgctgccagcgggaataattacggattttggcatcgttaaactccttaagcgatatgagcaaaggacgtgggagaaagcgcgtcgcagaatgtttcgacgtcgctgacccagccaaaaaaggtttcgatattgaacaacgcggctttctgcgcaaatttcggccccgcctggtgagttgcgtcttcaagcaccacgccgaaatactccagaaaaaagccgtcgcgtagcgtcgattcgacgcagacgttggtagcgatgccggtgaaaaccagatggcgtattccgcggctgcgcaaaatgctgtccagcggcgtattgaagaaaccgctgtagcgcggcttcggcagcacaatatcgccaggctgcggcaccagttcatccaccagttgataatcccaggagcctttcgccagcaatttcccctgcagctgcggctgcttacgcatggttttcagggcgttcgatttatgaaaattcggtgagccgggtccgccagcctcgacatactgttcatcccagccattttgaaaccagatgatcagcatccctgccgctcgcgctgcggtcacggcggtttgaatgttggcaatgaccgggcgagtggttgagacatcaaacccggcgagatctaagtagccgcctggcgtggcataagcgttttgcatatccaccacgatcagcgcactttgctgcggatcgaaggtaatggcttccggtcgagcggttaaggtcgtcatcatgccacctcctgagtcagcgcaggtagatgggcgcggcattgcatcagtggttgaatgcgctcgccgaaggtttcgattcccgacagaaaatcgtcgaaggttaacagcacgccttcggcaccaggcacgcttgcgacttcatctaacatgcgcgcgacactggcgtaagaaccgactaacgtccccatattgatgtttaccgccgaagtgggatcggccatctgacgaacgttggtgtcagtaccggagcgggtatctttctgactttgttcggttagccagcttaacgcctcttcatccgcgcccgctttgtagtgttcccatttggcgcgagcggcatcgtcggtttcatcggcaatcaccataaacaacacataagagccaacgtcgcgtccggtttgctctgcggcctgtttcatccgcgcagcggtcggggcgaaagccgtgggtgtatttacgcctttgccgaaacagaagttgaaatcggcataccgggcggagaacgccatgccagcgtcgctttgcccggcgcagatcactttcatggggacactcggttgcggactcacgcgacaatcattcatggtgaaaaaaatcgcctttaaaatcgcttttccccgtgccccacaggtcgcgcagcacctgaacatattcggtgagatagtcgtaacgacgggagaaatagtcatcgccaggccagatacccatctgctcatactcgggcttttgccagccagtcacgaggttgacgccaaaacgcccgccagagatggagtcgatggttgcggccatacgggcgacgattgccggaggtaacgttaaggtggcagcagtggcgtaaatctgaatgcgcgaggtcacggccgccagccccgccatcaaggtgaacgactcaaggttgtgatcccagaactcagttttgccgtcaaagccacgcagtttgatcatcgacagggcgaaatcgaaatggtagtgctccgctttttgcacaatggctttattcagttcaaaggtcggcatgtactgcggcgcgtgggtcgaaatgagccagccgttgttaccaataggtacgaatacgccaattttcatcatcaacctctcttcgtctcgtaaagtgaaagtcagacggggcgctgcatcctgcatatccttttcagccgcgtattggcttgtttgcaaagcggatgccagtttttaaaaagttaatgttattaatctgttaacattacgttatctaaaatatctggtaaaaagtggactaaacggtcaaaacagttgcacataaaacatgcatctgtgcgcgatgagagtgcagaaggtcgaggccgggcgggggttttgctatcctgttgccaatctacaagaggggagagcgcatgacgcaaggcgcagtgaaaacaacgggtaaacgttcgcgcgcagtaagcgcgaagaaaaaagcgattcttagcgcagcactggacactttttcacaattcggttttcacggcacaaggctggagcagatcgcagagttggcgggtgtttcaaaaaccaatctgctgtattactttccgtcaaaagaggcgctgtatattgccgtgctgcggcagattctcgatatctggctggcaccgttaaaagcgtttcgtgaagatttcgccccgctggcggcgatcaaagagtacatccgtctgaagctggaagtctcacgcgattatccgcaggcttcgcgcctgttctgtatggagatgctggcaggcgcgccgctgttaatggatgaactgacgggcgatttgaaggcattaattgatgagaaatcggcgctgattgccggttgggtcaaaagcggcaaactcgcgccgattgatccgcagcatttgatttttatgatttgggcttccactcaacattacgccgatttcgcccctcaggtggaggcggtgacaggcgcgacgttgcgcgatgaggtatttttcaatcaaacggttgaaaacgtgcagcggattattattgaggggattcgaccacgttaaagatgccggaggaggttgtaacatcctccggctacctgtttaacctatagtcattaagctggcgttaccgccagcggcagcggtattcacactcagcgaacgctcgatatacagccgttccagaaggatattgctttcgccacgggcaaaaccctgcaccgaaacaattgtgccatcccgcgcggcaactgcttcacacaatgcgcgaagctgatccgaatcaccgtggaagatcaccgcatcaaacggttgagcggttatattttccgctttcgccagttgaatacgttcgctgactgccgatggcaatgccttcactaactgacgatgcagcgcgtcatccggccacagtacctggctgcccaccgccagcacggcggcgagctgagtcagcgcatcctgctcatcatcggcaatacacaacacgcgctcacgcggcagcagcgtccaggtgttgcgttcacccgtcggccccggcagcaatcgttgtgttcctgcctgcgccagctcgccatattgcgtacataacgcctgcaattctggacgatttgctgcccattcccgcagtgcatttagcggctgagtcaatgcggctttcaactgcgcatcgaccggatactttgcatcctgacgcgcgagcgtcactgccagcgcactttccgggcgattcgccagcagacggtagagatagagcggaccgcctgctttcggcccggtaccggacaacccttcgccgccgaacggctgcacaccaaccactgcgcccaccatattacggttaacatacaggttaccaacatgggccgagccagtgacctgggcgatggtttcatcaatgcgcgtatggacgccaagcgtcagaccataaccggaagcgttaatctgctcgatcagctctggtagctggttacggttgtaacgcaccacatgcagcaccggaccaaagacctctttttgcaattcggcaaagtcatccagttcgatcagcgtcggggcgacaaaggtgccgctttgccattcacgggcatcttcgctgttttcccgcaccgcctggaacaccggacggcctttgctacgcatggtctgaatatggcgctcaatattggctttcgcttcgctatcaatcactggaccgatatcggtggtcaggcgacccggattacccatccggcattcggccattgcgccgcgcagcattttcaacgtgtggtcggcaatctcatcttgcaggcacagcacgcgcagcgccgaacaacgctgacccgcactgtcgaacgccgaggccagtacatccacgacgacctgttcggtcagtgctgaagaatcgacaatcatcgcgttcatgccgccggtttcagcgatgagcggaatagggcgaccctgagcgtccaggcggctggcgatattgcgctgcagtaacgtagcgacttcggttgaaccggtaaacatcaccccgcgcacgcgatcatcacccgtcagttgcgcgcccacggtttcaccccgacctggcagcaattgcaccacgcctggcggtacacccgcttccagcaaaatggcgatcccttgcgcggcaatcagcggcgtttgttctgccggttttgccagcacgctgttacctgccgccagtgcggcggcgatctgcccggtgaaaatagccagcgggaagttccacggactgatacacaccacaggccctaatggacggtgggtttcgttagcgaaatcatcccgcacctgtccggcgtagtagtggagaaaatcgaccgcttcgcgcacttcggcaatggcgttactgaaggtttttccggcctcacgcaccagaataccaatcagttgctgcatctggctttccatcagcacggcagcgcggtgcaaaatcgctgcgcgttcagccggaggcgtggcaaaccagattggcgcgttattaaccgcactttccagcgcctgttctacttcacgcggcgtggcttcacgcacatagcccacaatatctttcggttccgcagggttaataacgggcgacatctcacctgccgctaccggttgttccagcattggcaaggcctgccatttttgcagtgcactattgagcagggcagaggagagcgaggccaggcggtgttcgttagcgagatccagccctgccgagttgtcgcgcccgtgaccgtaaagatcgcgcggcaggggaattttcggatgcggtaatccagtttgcccttcctgttgcgccagtttttctacagcagtgaccggatcggcgaccagttcatccagtggcaaagaggtgtcggcaatacggttaacaaacgaggtgttagcaccgttttccagcaggcgacgcaccagatacgccaacagcgtttcatgtgtgccaaccggagcataaatacgacacggacggttaagtttgccgtcggcaactttcccggtgacctgctcatacagtggctcgcccataccatgcaggcactggaactcgtactgacccgggtagtagttctgccccgccagttgataaatcgccgccagcgtatgggcgttgtgcgtcgcgaactgcgggtagattagattcggcaccgccagcagctttttcgcacaggcgagataagaaacgtcggtatacaccttgcgggtataaaccggataaccttcaaggccgtccatctgcgcacgcttaatttcactatcccagtacgcgcctttcaccaggcgaatcatcagacggcgacggctgcgggtggcgagatcaatcaggtaatcgatcaccaacgggcagcgtttttgataagcctgaataacaaaaccgatgccgttccagcctgccagttccggctcgaaacagagtttttccagcagatcgagggagatctccaggcgatcggactcttcggcgtcaatgttgataccaatatcgtactgacgcgccagcagggtgagtgatttcagacgcgggtaaagctcttccattacccggtcatactgggcgcggctataacgcggatgcagcgccgacagtttgattgaaatgcccggcccttcatagatgccacgaccgttagacgctttaccgatggcgtgaatcgcctgctgataggaaaccatatacgcctgtgcatctgcggcggtcagcgcggcttcgcccagcatatcgtaagagtaacggaaacctttctcttccagcttgcgggcattggctaacgcttccgcgatggtttcgccagtgacgaactgctcacccatcaggcgcatcgccatatccacacctttgcggatcagcggttcaccgcttttaccgataatgcggttcagcgagcgggagaggctggcttcgttatgggtggaaaccagtttgccagtaaacagcagcccccaggtggcggcattaacaaacagtgacgggctacgaccaatgtgtgactgccagttaccgttgctgattttgtcgcgaattaacgcgtcgcgggtggctttgtcgggaatacgcaacaacgcttccgccagacacatcagcgccacgccttcctgcgatgacagcgaaaactcctgcaataacccctggaccatacctgcgcgaccactggcatttttttgattacgcagtttatcggccagctgatacgccagtttgtgcgcctgttcagcaactggctgcggcaggcgggcttgttccagcagcatagaaaccgcttcggtttccgggcggcgataggccgcggtgatcgcggcgcgggaaaccgactggggcaatatttgctcggcaaagtcgaggaatggctggtgtggttcctctgccggagtcggtgcttcatcgctctcattggccgcgccagaaagcagcgcaggtagctccggcagagtatcgctgttttccagttgttcgagataagaaaaaatcgcctgcttaattaaccagtgtggtgtgcgatcgatacgtgtcgcggcagacttaatacgctcacgcgtcgcgtcgtccagcttaacccccatggtggtggttcccatgccattactcctgttgttcagaaaggtgcaacttaacgttatcgtgaaatatccatgatgttgcaactttgtgcaaccatgttaaatgtgacatgcgtagcaagcttaaaaatgaatgaaatgttaataaaagaaatcgatatgacagggattaaaaaaataactcagactttttctctgcggcagttaacatttttgaaaggtgcaaccgcaaaaaatgtgagagagtgcaacctgatgaaaaatagtgtcgctgagcactaaaatttaatgtaaatggtgtgttaaatcgattgtgaataaccagcgcttccggcaggatacggtcgccctggtaaaacataaactctgttaccccgttccggtggcagatataacggcaagtttcgacattgccgataataattttttggagactttagatggctattagcacaccgatgttggtgacattttgtgtctatatctttggcatgatattgattgggtttatcgcctggcgatcaacgaaaaactttgacgactatattctgggcggtcgtagtcttgggccattcgtgacggcattatcggcgggtgcgtcggatatgagcggctggctgttaatggggttgccgggcgctgtttttctttccgggatttccgaaagctggatcgccattggcctgacattaggcgcgtggattaactggaagctggtggccgggcggttgcgtgtgcataccgaatacaacaataacgccttaacactgccggattatttcaccgggcgctttgaagataaaagccgcattttgcgcattatctctgcgctggttattttgctgttcttcaccatttattgcgcttcgggcattgtggcaggcgcgcgtctgtttgaaagtacctttggcatgagctacgaaacggctctgtgggcgggcgctgcggcgacgatcctttacacctttattggcggtttcctcgcggtgagctggactgacactgtacaggccagcctgatgatttttgccctgatcctgacgccggttatcgtcattatcagtgtcggtggctttggtgactcgctggaagtgatcaaacaaaagagcatcgaaaacgttgatatgctcaaaggtctgaactttgttgccattatctcactgatgggttgggggctgggttacttcgggcagccgcacattctggcgcgttttatggcggcggattctcaccacagcattgtccatgcgcgtcgtattagtatgacctggatgatcctctgcctggcaggggcggtggctgtcggcttctttgggattgcttactttaacgatcatccggcgttggctggtgcggtaaatcagaacgccgagcgtgtgtttatcgaactggcgcaaattctgtttaacccgtggattgccgggattctgctgtcggcaattctggcggcggtaatgtcaaccttaagttgccagctgctggtgtgctccagtgcgattaccgaagatttgtacaaagcgtttctgcgtaaacatgccagccagaaagagctggtgtgggtagggcgtgtgatggtgctggtggtggcgctggtggcgattgcgctggcggcaaacccggaaaaccgcgtgctgggcttagtgagctacgcgtgggcaggctttggcgcggcgtttggtccagtggtgctgttctcggtgatgtggtcacgcatgacgcgtaacggtgcgctggcggggatgatcatcggtgcgctgacggttatcgtctggaaacagttcggctggctgggactgtacgaaattattccgggctttatcttcggcagtattgggattgtagtgtttagtttgctgggtaaagcgccgtcagcggcgatgcaaaaacgctttgccgaggccgatgcgcactatcattcggctccgccgtcacggttgcaggaaagctaagggacttagcctgcggcggttttgtttggcttcagcagcgggttgcgctcccttaatgtgcctcgccatataaattgaatggtgcagggagcgcgcagggggcggccaatcgccgccgccccctgctgtcccggccttcggggaacgcttcagcgattttgacgccaccaacacccgagctgttattatgttccgggcaaaaagttagatttgataatcgcggatggacgaaattgcttgatacacccgcttatcagttttacatggaagctctgatgcattgagtctggacagttttgtcggctggatacggcgtttacgcggcatccggcaagaacacatggttctttgcaaacaatcccatctttctaccctggaataatcgtttatatcccttggcattacctctctttgtttacattccaacatcattttataaacattccgcttgtgtttttctttgccgtaatgataatcgctatcactgcgatttacttttctttgcatagattgactcagaaaaacgtttaagggtgggtggcatgtttgttccgtttctcattatgttgcgcgaaggacttgaagccgcgctgattgtcagtttgattgccagctatcttaagcgtacccagcgaggccgatggattggtgtgatgtggattggcgtgttgcttgccgctgcgttgtgcctgggcttgggtatcttcattaacgaaaccaccggcgaatttccgcaaaaagaacaggaactgtttgaaggtatcgtggcggtgatcgccgtggtgatccttacctggatggttttctggatgcgcaaagtgtcgcgcaacgtcaaagtgcaactggaacaggcagtcgatagcgcattgcagcgtggaaatcatcatggctgggcgctggtgatgatggtcttttttgccgttgcaagggaagggctggagtcggtctttttcctgctggcggcatttcaacaagatgtcgggatctggccgccgctgggtgcaatgctcggtcttgctactgccgtggtgctaggcttcctgctctactggggcggtattcgcctcaatcttggtgcattttttaaatggaccagcctgtttattctcttcgtcgccgcagggctggcagctggtgccattcgcgcatttcatgaagccggattgtggaaccactttcaggaaatcgccttcgatatgagtgcggtgctctcaactcactcgctgtttggcacgctgatggaagggatttttggctatcaggaagcgccgagcgtcagcgaagtcgccgtctggtttatttatctcatcccggcgctggtggcatttgctctgccaccacgcgcaggggcgacagcgtctcgctccgcgtaacaaatacgacgcaaactcttgcttagttacaacatactttaaagggatagtctcgtcatgaccattaacttccgccgtaacgcattgcagttgagcgtggctgcgctgttttcttctgcttttatggctaacgccgctgatgtgccgcaggtcaaagtgaccgtgacggataagcagtgcgaaccgatgaccattacggttaacgccgggaaaacacagttcattattcagaaccacagccagaaggcgctggagtgggagatcctcaaaggcgtgatggtggtggaagagcgggaaaatatcgcccctggctttagccagaaaatgacggcgaatttacagcctggcgaatacgatatgacctgcggtctgctgactaacccgaaagggaagttgatcgtcaaaggtgaggcaacggcggatgcggcgcaaagtgatgcgctgttaagtcttggtggtgcaattactgcatataaagcgtatgtcatggcggaaaccacgcagctggtgaccgacaccaaagcctttaccgacgcgattaaagcaggcgatatcgaaaaagcgaaagcactgtatgcaccgacgcgccagcactatgagcgtattgaaccgattgctgaactgttctccgatctggatggcagcattgacgcccgtgaagatgattacgagcaaaaagccgccgacccaaaattcactggtttccaccgtctggaaaaagcattgtttggcgacaacaccaccaaagggatggatcagtacgctgagcagctttataccgatgtggtcgatttgcaaaaacgcatcagtgaactggctttcccaccttcaaaagtggtcggcggcgcagccggactgattgaggaagtggcagccagcaaaattagcggtgaagaagatcgctacagccacaccgatctgtgggatttccaggctaacgttgaaggctcgcagaaaattgtcgatttgctgcgtccacaactgcaaaaagccaacccggaactgctggcaaaagtcgatgccaactttaaaaaggtcgataccattctggcgaaataccgtactaaagacggttttgaaacctacgacaaattgaccgatgccgaccggaatgcactgaaaggaccgattactgcgctggcggaagatctggcgcaacttcgcggtgtgctgggactggattaagcgttatgcagtataaagatgaaaacggcgtgaatgaaccgtcacgccgacgtttactgaaagtgataggtgcactggcgctggcgggaagttgtccggtcgctcatgcacaaaaaacgcaaagtgcgccgggtacgctttcaccggatgctcgcaatgagaaacagccgttttatggtgagcatcaggcagggatcctgacgccacaacaggccgcaatgatgctggtggcgtttgatgtgcttgccagcgataaagccgatcttgagcggttgtttcgcttgttgactcagcgttttgcttttctgactcagggcggagcagcaccagaaacgccaaatccgcgcctgccaccactcgattccggcattcttggcggctacattgcgcccgataatctcaccatcacgttatcggtgggtcactcattgtttgatgagcgctttggccttgcgccacagatgccaaaaaagctgcagaagatgacgcgtttccccaacgactcgctggatgcggcgttatgtcatggtgatgtgttgctacagatttgcgccaacacccaggacacggttatccatgcgctgcgcgatatcatcaaacacaggccggatttgctcagtgtgcgctggaagcgggaagggtttatttccgatcacgcggcgcgtagtaaaggcaaagagacgccgattaatttgctgggtttcaaagacggcactgccaatcccgatagccagaatgataagttgatgcaaaaagtggtgtgggtaacggcagatcagcaggagcctgcgtggacaatcggtggcagctatcaggcagtacgcttgattcagtttcgagtggaattttgggacagaacgccgctgaaagaacagcagacgatttttggccgtgataagcaaaccggtgcgccgctgggaatgcagcatgagcatgatgtgcctgattacgccagcgacccggaagggaaggtgatcgcgctggacagccatatccggctggcgaatccccgcacggcggagagtgagtccagcctgatgctgcgtcgtggctacagttattcactgggcgtcaccaactccgggcaactggatatggggttgctgtttgtctgctaccaacacgatctggaaaaaggcttcctgacagtacaaaaaaggctcaatggcgaagcgctggaggaatacgttaaacctatcggcggcggttatttttttgcgctgccgggggtgaaggacgcgaacgattatttcggaagcgcgttattgcgggtttaatgtttttaggcggataaggcatttgtgcgcagatgcctgatgcgacgcttgcgcgtcttatcatgcctacaatcagtgcgggtttggtaggctggataaggcgttcacgccgcatccggcgatcgtgcactgatgcctgatgcaaatcctgctgaaagcacacagcttttttcatcactgtcatcactctgtcatctttccagtagaaactaatgtcactgaaatggtgttttatagttaaatacaagtaaatatattgttgcaataaatgcgagatctgttgtacttattaagtagcagcggaagttcccggcagtgatagtcagtcactatggagatcgcggatggtaacgtcctgtactggacatgttttagataatcaacgcgccaccactcgcggagttttctcctccggtagtcatctcgtcactttgcattttcaacctcatcctttcttttcatgtgttaccgacgccgtaaacggtgcgcgtagccgtttttcggcattttatccaaaagcaaactatggcttacaaggaagccaaccctctgatgttcgtgcgcataatcgcgctgccaacggcgcgtgtgatgaatacaaacaactcaaggtgctctccatgggaagacaaaaagcagtgatcaaagctcgtcgcgaggcaaaacgtgtgctgagacgggattcgagcagccataagcagcgtgaagaagaatcggtcacctcgcttgtgcagatgggcggcgtagaagccattggtatggcccgcgacagtcgcgatacttcgcccatcctcgcgcgaaatgaagcgcaattgcactatctgaaggctattgagagtaagcagctgatattcgccacgggcgaagccgggtgcggaaaaacctggatcagcgcagcaaaagcggcagaggccctgatacataaggatgtcgacaggattatcgtcacccgtccagttctgcaagccgatgaagatcttggcttcttacctggagatatcgcagaaaagtttgctccctattttcgcccggtctacgacgtgctggtccggcgcttaggggcttcctttatgcagtactgcctgcgaccggaaatagggaaggtggaaattgcgccgttcgcctatatgcgtggacgtacctttgaaaatgcagtcgtcattcttgacgaggcgcagaatgtgactgccgcgcaaatgaaaatgtttttaacccgcctcggggagaacgtgacggttatcgtcaacggtgatatcacgcaatgcgatttgcctcgcggcgtgtgctccggattaagtgacgcgctggaacgtttcgaagaagatgaaatggttgggatcgtccggttcggtaaagaggactgcgtacgttcggcactttgccaacgtacgctgcatgcctacagttaagtgtgttatcggtgcagagcccgggcgaaccgggctttgttttgggtgtttatgcccggactagcgctttttctgaaacaaccatttttatttgcccctggctggtgaagtgtacgctcatcctgtggcttttttgtagttgctgatagagctcatcaggtattgctaagctctctgcatattcttgcggcgtatattggtaggctgcatgatgctgctgtttttgaaaacgcagcttattgtacagcgcccagacaattaacacgacggcattcgccactgccagcaaaaaatagaactgaagtcggcttctggcctcgctttgccagtaataacccgtcagcagatccatggcgaataagaatatgaacaacgcaaataatgtccacaagatggttgtggcaacataatcaaccagtaaacgtactggtgattgtcgggtcgtaataattaaattgttcatattaacctctcagaatcccgcgatcgggacttacccaacgggcgcgttgctttttaggcatcaacatgactcgtgtaaatgataccaatgtcgttgccaggctcagcatccagaaaataaccgggaaccaaataatccagaaaagcgatgaagtcagattatgctcatagcgattctcgatcatcaggctgacaataaattgcagtaaacataacgtacacaataatattccggcagtatgtgtcgcagcgatatgtgtcaattcaatatttaacggtacaccggcaagttggattgcgtaaataatgaaaccgaccaggcaggtgaaggcccatattgtcgtcaggcagtattcaaaaaacagcggccacattcgaaagttttctttgcgccacaaccttgtcatatttttgaggaatacttctgcaccgccctgagcccagcgcaggcgctgtttccacagcccttttaacgtttcaggcattaatatccagcacagtgcccgtggctcgtaaaaaatcgtccactgattcaactgcagcttccagctaatatcaatatcttcggtgatcatatcgtcactccagtaacccacttctgccagggcgctgcgacgaaatgcggcaataacaccggaaacggtaaatacgtttccatagatacgctgggttcgcttgatcaaaccaataattgaggaatactcgccaacctgaattttacccaccagggtagaacgtgttcgaatacgaggattaccggttacggcacccacacgcgggttgtacaacatcggttccacaatatatgccgccgcatcgcggtctaataacgcatcgccatcaatgcacaccagatattcacttttcgccgcggcagctccggttttaagcgcaatggctttcccctggttttgcgccagatgaatgacccgcaaatggggaatttgtgcagccatgcgatccaggatggcacgggttttatctgttgaaccgtcatttacggcaataacttcaatgttctcataacgctgtgctaaagcggcgtgtatggtttcctcaacgtttttctcctcattaaaacagggaatgataatggagatagacggattatctttcaactggggagctggtgcgttttctccccacggccagtggcgttcacgatagacccagaaatagacgccgccaacaatccacataatggacataaaaaacggccagaagaaaacgaacctcatcatcagttcaccagagtgaaagtacgctacgcataggggtatgcataacaccagacataatataaaaaacgatacgatgcgattaatcatttttcggataccaggctgttgaaaactcaggacgaataaggtctatttcaggttggttatgcagaaaattgtcgggataataaccatagtttttcactccattcagttgtaataggctcatccagtgagcgagttgttgcgaagaaatagcctgatgctgaccatttttctgccagttttgtgcctgtaattctaaaatagatttgtctttagcctgagggatgtttttaatttgattggtcaattgtattaaccattggtcagccgatttttctgcgacaccttccagataaggcatagccataatagcggtccagtcatagctttttaggaaatcagcataattctgtgcaaaccaggcttcactttcaggttgtattaccggaagtgcaaaaatatttcgtgcagttttaatatgtggaccgcgaatggcttttacgcgcgcactaagttctaaagtgaagtcagttaacgcacgacttttaaagcgggcccactgtttaaattgctccgggttttgtcgaatttcgctcagactcccgctaaagcctgcttgctgataagccgtgatagccggtgcactggcatcttcataatctgaaagcaaagcatcatcgtggaacaatatgccatcaaaagcagcatgtccggcaagatcttcatataacatgccaacttgtgctctgactctgtcatcgaaaggagagagacggtgatattgttcaggatgaatttgtgcttttttctcccctgttggtaagtattttactcgcgttaatgtgggatctaaatcccagcttaataccggcatccacgcatagatgtttacacctgagcgggtacgtaattgccaggcaacccgactaaaaatatctgctttcattggtagcaaacgatttggaaaccagacctctttgaccagcccatcaccatcgggatcagcaaatgcctgcaaatacacggttgatatttgcatatctttcacccgctgaattagcacatcaatattgcgatccatttgctggaggttttcgtcataaacgtaatcaagatcgatatgcattatccgttgtggtgatttttcctgtacggtaataatttgctgggcaaactcttttaatgagggattattggcgattaatacccgcggaatggaatccaattgcgacgcatttgccaaacctgattcaagggtgaagaacatgtcataaccgagtttttttaattcctctatcgctatgccattcgcttcgccataaggccaaacaaaaacgtgtggatttacctcaacctttgtacgcaggtattccgtcatttttacagcatccagacgaattctttcccggtattctgctgcggtttcataccgtgcgtggtcagtaaaatatgcacgatttacatatacaggcaataagctgccggtggcattagcctgaataccgtagtgagaattccatgtatgagaagcgagctcaacgagccgggaacgcgcaacttctcgcacttgttgccacgtggcaaaatattctcgatcgaccaactcatcgccaaattttacttgtttatccgctggcgtatcgacccaactgccgacgggggcccatacagcaggccactggaaggcctgaagaattgggaagacgcgggtataaaaactctggtagccgtcatcaaaagtcagcactacagctttttccggtagcggttttcctcctcgatgtgcttcacgaatttgagcaatactgaccggttgataaccgttctcgcgcagccaggcaaattgttcacgcagtgctgatgtccgcactgacataaaacgctggtcggcagcttcgtcttcaacgttatgccatgaaatcgctacaaaaccattatgcggccacggttgctcggcgagtaaagattcgcgatcctgtggcggtataaatgatgttcttgactggctaatgcacgcggtgagcataattatactcaccagcatcaggagatatttatttccattacgtaacatatttatccttaaaatctgaatgtcatatcgaattcaacgtataagttgtgttctctgtcaccgtcataaggtcgtttttcccagcgtagcgttgcgccagcatcaatcacgtcattccaactaatgcgttgcccgtagccgagttgggtgacgacatccgtgccataatgtttttgccaggaggcaccaacacctgcgctgaatatttgctcccagctattttcatagcttcgccataacaaatggcttgcctcaaatgccggaacaatatcgaacgtttttatagggttgtagtatggggtatcgtgttctgtattttgttcgtaatacagactgggtaggaaatcgacaatcaaatatggtgaagaccagatgcgttcctgaccctcaagtgagacttcatgacgctggttactgtcggaaaaatcagtgaaagcccaggagacaccgtacttacgccgctcattttgataccagcgaacataagcctgagcactgttgcctgtaacaccatttttcattgcccgtaatggaacgcggtgagagaggcgttccagttgcgaaccaatacgccagttatcattaaaatcataccagccagacaggcgcgcgccgggtttatgctcatgattgaaaacgcgttcagcgtactctgcctcgagccagatattacgtgaccgccactcaacacccgcaagccagtcgcgaacaatcccttttccttcgctaaattgtccatcggcataaccgaatccagcaaaaccgcgccagttatccttcagcggtggtgaataaacgatggtggttaagtcgacatcatgtttactactatccgggccttcggcatcaattcctgttgagccagcgatacgaagctctgcaagattatgtacatcaaccgcacgttttaatcgtacaacgccgggatcttgcggttcacgttcgacaacatcgtgcgttaagacagctgcctgctgccattcttgtaacgttaatgctgtccaggcttgttcaacctccagattaatattacgtggctcgatcacttctgctttttttaattcattttctgctgcacgaggccaaccgcgggcttgtaacacactcgcgtaatcaatgcgcagtccctgatttcctggtgcgttataagcaagctctctggctgtcatttcagcctgaggaagatcattactatattttgctacggttgagagaaacgaatgcccctgtaaccaggtatcattcgggatgctcgtaggcgtgcccattaaccgaaggaaaggcggcgaagtattaatggtatgttgggtgacagttagcgcgcccggataattttcactctccaggtggctgtaaaagagatccgcaagttcttcatcggataaatccggggcaatggtctccttgtgataaaagagctcggtcattattgactgtgcttttttcggctgatgatctttgagataagccgatgcaacccaatattgcccccagggcggaataatttgccccgtcttttttaatcgctgatagtgagaaataacgtctttataacgatcgcgagttaataacgcgccaagatgatcaacctgaatacgctggtactgggcagtgcggtctgggttatcgtgccacagaatttctaatgcagcgtattgggcgagggcgcgatcggcaatggcataacgttcactttcactgcgcgtaggcataaacgacagtctgaccagttcggcatgaatatcagcgcgaatatctggcgttaaattggcatcgtcaatcgcggcagcaagttgattattacgtaatgcctgcacgtattctgtgggatattgttgcgtagatgcattttcaggtaatgactctgtcatcgcccgtaattcatcctgatgacgccccgccagtttatagatataggcttctgcgagtaaattggctttgtccggtgctccagagttaagctgcttaagtttaaccagcgcagtatcatagtgaccagcatctgccagggttaaaatttgtccccgttgataatccttattttgcggctccagagagagcgccttttgccacagtgtaagcgagttttgccattgttgcaggttacgataagcgacggcgacagctgcataaccacgcgctggtaattgctgatgacggtagcggttgtaaacggtaataacctgtttatcttgcccggcccataaggcaatctgtaaccagtcagcaatttggttattgctgagtgctgattttagtgcaaaccatgacaaagctggctgagtattacccttgcgagcttcaataatcaatgcatcataggcgttattaacagcactcttcgccgcgggactcgctgctaaaaatgcggcagtaagaagtttcaaagcccatttggttttcgggcacctttttctgctacttgaatacatcctgtattactccatgtattgccaaaatctctctctgtatctaattacaggtaactgaaaagaaagatatttttgcacctcataatccgttattaaacgcggaagagagacgtgaattgttgatgatgagaagaagaaatgatgagcagagtgtccatataaaatccttttctcgcccgaaaatccattccaatgatgaggatcttcaggaatacggcataaatcccaatgcctttttcaaaataaattaggattaaaataattaaatcagtaaattccgatgcatgatttcggatttttcgaaagtcctgatgaaaggctgcgctacggcactcacggatttaattgttattcctaatgtatctatgaattaatgttttataaggattttctataaccatttataagtattttcaagcctggcttgttgcaaacaatgtataaagcacttaggcaataataattacattcagcaactatcatcatcggtattgtttgtgggcggaatttcatattgacaacagtacagttcttatatctattaataatagaaagggatctacaacctacagattggtgtagctttatggaaaaagactatttgagaattagtagtactgtattagtgagcttattgtttgggcttgctttggttttggtgaatagttggtttaatcagccaggcgttgaggaagttgttccacgatcaacctatctgatggtaatgattgctttattttttatcgatactgttgcatttatttttatgcagttgtatttcatttatgaccgtaggcaattttcaaactgtgtacttagtttggcttttctgagttgtttgatttactttgttataaccgtcattatcattcagcaaattattgaggagcgtttgacaagcagtgttgtccaaaatgacattgcaatctattatttgtttcgtcagatgagtttgtgcatattaatatttctggcattggtgaataaagttagtgaaaacacaaaacagcgcaatttattttccaaaaaaatgactttgtgcataagtttgttttttgtttttggggggccgatagttgctcacatactttctagtcattatgagagctacaatttacacattgccgagttaaccaatgaaaatggtcaggtggtttggaaagcctcatatgttaccataatgattttcatgtggttaaccttgctttcggttaatctatgctttaatggtttacgctatgatatctggaatggagtgacggtgattgctttttgtgccgtactgtacaatatctctctgttatttatgagcaggtatagcgtgtccacttggtatattagtcgcactattgaagtagtcagtaagttaaccgttatggtaatatttatgtgccatatattcagtgcgctacgagtaacaaagaacattgcacatcgcgatcccttaaccaatatatttaacagaaattatttttttaatgaactgacagttcaatcagcatcagcccaaaaaacgccttattgcgtcatgattatggatatcgaccacttcaaaaaagtcaacgacacctgggggcatccggttggcgatcaggtgataaaaacagtggtgaatatcattgggaaaagcatacgaccagatgaccttttagcgcgcgtcggcggcgaagagtttggcgtcttgctgacggacatcgatactgaacgtgcgaaagctttagcggaaaggattcgggaaaatgttgagcgtttaactggcgataatcctgaatacgctataccacaaaaagtgacgattagtattggcgctgttgtgactcaggaaaatgcgttaaacccaaatgagatctatcgactggctgataacgcactttacgaggcgaaagagaccgggcgtaataaggtggttgtgagggatgtggtgaatttttgtgagtcaccataaagcggcattttgatcctacccacgtaatatggacacaggcctaagcgaggttctggttttcaaattgttccggactgaggccgccacaccaactgtgccgccgccaccgattgtaatcacattcgatataattaaacaccgttgcccgcattatttcccggctgataaagtgttctccatggatacattccactttcagcgaatgaaagaagctttccacgcaggcattatcgtagcagcaaccttttgcgctcatacttccacgcagattatgccgcttcagttgcgcctgataatctgctgaacagtactggcctccacggtccgtgtgaacgataacgttccggggcctcttacgccgccacagcgccatctgcagggcatcgcaggccagttgcgccgtcatgcgtggcgacattgaccagccaataacggcacgtgaccacaggtcaatgaccactgccagatacagccagccttcatctgtacgtaagtacgtgatgtctcctgcccacttctggttcgggccactggcgtaaaaatcctgctccaacagattttctgacacaggcaggccgtgtgcgcggtagctgaccgggctgaacttccgggaggcctttgccctcagtccctgacggcgcaggcttgccgccacggtttttacgttaaaggggtaaccctgagcacgcagttcatccgtcaggcgtggggcaccgtaacgctgttttgaccgggtaaaagccgcgaggacaacgctgtcgcagtgttggcggaactgctgacgcgtgcttatccttgtccgccgctgacaccacgtataccagccgctgcgggccacccggagcacgcggcacattgctttgatgctgaactcagcctgatgtttttcaataaagacatacttcatttcaggcgcttcgcgaagtatgtcgcggccttttggaggatagccagctcttcatcccgttctgccagctggcgtttgagacgtgcaatctcggtagacatctccagttcacgttcagaagacgtctgctgattttgctgtttactgcgccagttgtagagttgtgattcatacaggctgagttcacgggctgcggcagtaacaccgatgcgttcagcaagcttcagggcttcactgcgaaattcaggcgaatgctgtttacggggttttttactggttgatactgtttttgtcatgtgagtcacctctgactgagagtttactcacttagccgcgtgtccactattgctgggtaagatcagtgcctggcacacgcgtttgatggaagacggcgttcaggcaatgcgcgattatcttgccggactggatatcgcttcgccagagcatcaggttctgatgaacgtaacagcaaaaagcgaggtcgctccgtcaattatcaaagaaaatctctcattacacttaactcatacggtgaaatggactgaatctctcgatacatttctgaatatgccaaccccggtagctttccttgaaataagtaataagccctatttggggaatatgttaaatgattttgctggcgtggatcagcaacgagttatgcattgtcgtaaagcatttagtgatgcaaaggtattcaaatgattcctgattatttaacttttattcgctttcaggataaacgaaatctgatatacatttatgctattggacttattctgataggcttttattggaagaatgcagggtttacttttccatcagaggatattggtgtagttagtgggattctggctctggtgctgtataattttatttttgatctcaaggcgtactgggcttataaatgcgtcacgaagaatatcgatttttcgtggtttaagaaaaagcagaaccacaaaatagaattatttcttacacaacctctggtggcaggatttctgtcgttaatcatgttgagtgcaatgagttgggggctataccagcttctaccctcgttatatgcgctgttcctgatttcgttacttgggccgttggtcatctttctgctgtttcggatgatccgcaccagttatgtcaagcaggtcgctatttcagtagcgaaaaaagtaaaatataaaagtctgactcgctatgtgctgctttcggtgtgcatctcaacggttgttaacctgcttactatcagcccgttgcgtaacagtgattcttttgtgacagaggggcagtggttaacgtttaaatcgataattgcattgctcattctttgtggcgtagtgttggcgattaatctgttttttctgcgcttctccaagcggtacgcttttctgggcaggctttttttgcaggaaatcgatctgtttttctccagtgaaaatgcgttgtcgaccttttttgccaagccgctttggcttcggttattcatattgctggttattgaagtgatgtggattacgctggtgtcggtattggcaacgcttgtagaatggcggatttggtttgaagcctattttttactctgctatgtaccgtgcttaatttactattttttctattgtcgattcctctggcataacgattttatgatggcatgtgacatgtatttccgttgggggcattttaataagtgaggaagtgataggaagtgaccagataatacatatatgttctgtactctcttgcgcattttgattgttgactgagtaaccagacagttgatgtgcacgatttcccctcgccctaacagacgtgggcgggggcacccggtgtgtgcaatatacgaaaaaaaagcccgtactttcgtacgagctcttctttaaatatggcggtgagggggggattgactcgcttcgctcgccctgcgggcagcccgctcactgcgttcacggtctgtccaactggctgtcgccagttgtcgaaccccggtcggggcttctcatccccccggtgtgtgcaatatacgaaaaaaaagcccgtactttcgtacgagctcttctttaaatatggcggtgagggggggattcgaacccccgatacgttgccgtatacacactttccaggcgtgctccttcagccactcggacacctcaccaaattgtcgttcctgtcttgctggaacgggcgctaatttagggaaatcatgacctgaggtcaacaaactttttgaaaaaatcgcgcgtttattcaaacttcaatcaatgtgtggttttaataagcgaaatctgctttttttgccaccgaccacggatttgttatgctggtggcctttgtagatcataatgataagtgcgaataaatttcgcacaacgcttttcgggagtcagtatggatatcatcttttatcacccaacgttcgatacccaatggtggattgaggcactgcgcaaagctattcctcaggcaagagtcagagcatggaaaagcggagataatgactctgctgattatgctttagtctggcatcctcctgttgaaatgctggcagggcgcgatcttaaagcggtgttcgcactcggggccggtgttgattctattttgagcaagctacaggcacaccctgaaatgctgaacccttctgttccactttttcgcctggaagataccggtatgggcgagcaaatgcaggaatatgctgtcagtcaggtgctgcattggtttcgacgttttgacgattatcgcatccagcaaaatagttcgcattggcaaccgctgcctgaatatcatcgggaagattttaccatcggcattttgggcgcaggcgtactgggcagtaaagttgctcagagtctgcaaacctggcgctttccgctgcgttgctggagtcgaacccgtaaatcgtggcctggcgtgcaaagctttgccggacgggaagaactgtctgcatttctgagccaatgtcgggtattgattaatttgttaccgaatacccctgaaaccgtcggcattattaatcaacaattactcgaaaaattaccggatggcgcgtatctcctcaacctggcgcgtggtgttcatgttgtggaagatgacctgctcgcggcgctggatagcggcaaagttaaaggcgcaatgttggatgtttttaatcgtgaacccttaccgcctgaaagtccgctctggcaacatccacgcgtgacgataacaccacatgtcgccgcgattacccgtcccgctgaagctgtggagtacatttctcgcaccattgcccagctcgaaaaaggggagagggtctgcgggcaagtcgaccgcgcacgcggctactaataaagcatcaggattcctgctatccttggcgggaattgaatacaggagagagttatgtatcccgtcgaccttcatatgcataccgttgccagcacacatgcatatagcacattaagtgattacattgcccaggccaaacaaaagggcattaaactttttgcgatcaccgatcatggcccggatatggaagatgcgccgcatcactggcacttcattaacatgcgtatctggccgcgagtggttgatggggtagggatcctgcgcggcatcgaagctaacattaaaaatgttgatggtgaaattgactgcagcggtaaaatgtttgactcgctggatctaattattgccggttttcatgagccggtttttgcgccacatgacaaagcgaccaatacacaagcgatgatcgccactatcgccagcggcaatgtgcatataataagccatcccggaaatcccaaatatgaaatagatgtgaaagccgttgctgaagcagccgcgaaacatcaggtggcgctggaaatcaataattcctcatttttacactcacgtaagggcagtgaagacaactgtcgtgaggtagccgcagcggtacgtgatgctggaggttgggtggcattaggctcggattctcacaccgcgtttaccatgggggaatttgaagagtgtcttaaaatcctcgacgcggtagattttccgccagagcgcattttgaatgtttctccgcgccgcttactgaacttccttgaatctcgcggtatggcaccgattgcggaatttgcagacctttaattactagtaatggaaatatattaatgaacgagttttctatcctctgtcgtgtgctgggttcgctctattaccgccaaccacaagatcctttactggtgccgctgtttaccctgattcgtgaggggaaactggctgcgaactggccactggagcaggatgagttgctgacacgtttgcagaaaagctgtgatatgacgcaagtctctgccgattacaatgcgttgtttatcggcgatgaatgtgctgtgccgccatatcgtagcgcatgggttgagggcgcgacggaagcggaagtgcgcgcttttctttctgagcgagggatgccattagcggatacgccagccgatcacatcggcacattgctgctcgcagcttcctggctggaagatcagtcaacggaagatgagagcgaagcactggaaacactgttcagtgagtatctgttaccctggtgtggtgcgttccttggcaaagtggaggcccatgcaaccacgcctttctggcgcaccatggcaccgctaacccgcgatgccattagtgcaatgtgggacgagctggaagaagattctgaagaataagtgtgatctacgtcactcataactgcaacggataatttgttgttgcataaaatgtgtgctcgatctcattcatggccgcgttttctgctatcatgcgcggcatgaacatacttctctctattgcaatcacaacaggcattctctccggtatctggggatgggtggctgtttccctgggcttactaagctgggcgggcttcctgggctgtacggcctactttgcctgcccgcaaggtgggctgaaagggctggcgatctccgctgcaaccctgcttagtggcgtggtgtgggcgatggtcattatttacggtagtgcactggcaccacatctggaaattctcggttatgtcataaccggtattgtcgcgtttctgatgtgtattcaggccaaacagctgctgctttcatttgttccggggacgtttataggcgcatgcgcgacgtttgccgggcagggtgactggaaactggtgttaccttcgctggcgcttgggctgatatttggttacgcaatgaaaaacagtggcctgtggctggcggcgcgtagtgcaaagacggcgcaccgtgagcaggaaatcaaaaataaagcgtgaggggcactcacgctttcgcttaaacagtaaaatgccggatgataattccggcttttttatctgtcaggattccggtggaaccgacatatggcggtatttcaccagaatgtcattctgccgttctgctttattttgcaaatcccacagaccacggtcgataccatcattaatcaggaaaatgacccctgtttcgatagccgacatcaggcacagcataacaggttcgttcgaggtgtaacccacttccccttcaagcaagcgctggtagtcaataaagcggaaaaccccggcctgaacttcataggaaagtatcgtcttactggtgttcaccgaagaaaggatctcgccggtactcacattgacgacgcgcaggttcacggcaatctgatcgagctggtattgcgtgtcggcaccgatgccaaaatatcttgccccaaccccgccagatttgacgttgctttcataaccgataatcgaaccttcaaccatgatatttgccgccgttaaagattgcagcgggattcggttattaatggcaaccgtgccgttttcttgtgccgcacgaataatcttgcgctcgttaagcaggttttgtaagccctggcgctccagcggtataaaccagcgagaatctttcagtgccgtgaccagcattgccgtggcgctttgcggaacagcagtggagaagttacttgccgggtagggtttaaattgcccggtttcgtcctgaatgttgtataccgaaacaaagattttacccgtcggcgctggcagatgggtcaaatctttgtagctctgagcacgaggcattaatgtcggtctggcggcttctttaggcggggcggttaagcatccgctcagtaacatgacggcaaccaaaagaaataagcgctgcatgattattttccttatgaagctggggcttaaaaatcggttgagttattttgtaaacccgaaacctggatggtcgaggtttgtccggttttacgatctgtcacgttcaactgcaattgaccatcgcggttggcaatatcgacaatataatcgttggtcaccatgcggcccggtttaccggtattaatattcgacagtagcccacctaaaatttgtgactggatggcctgagtaaagttatctaacgctgagggtgtttcaataccaaagtcatcgttatagctcggatctttataagagttttgggcctgagcgctatttaataaaaaagcgccattatttgggttaccaccaaagtttggattacggaactggaaagtcatggttccagcccaacttaatggcgaaataagcatgagtagaactactgcatgtttgacacgcattgcagcctccgaacaattttttatttagaattcatcatgcgccaaatcgcccgtacttaataacgcctgatttatctggcgacgatttagtgcttcttcagtttgaatcagtgcaaagacgacagttttctcgaagtctcttttcaacggaaataaaaaagtctggaaaataacgtcctgattgaccgttatagtgatccagcttccccatcgtgcactgggcctttcattaatcgttaagttacccgtatagtcactttcccatttatcactaaaggctcggtaaaaatcatggccaatagatgaaacagtatggtcagttagcaatcccgggacttctacctcaacggcgtgaagattccctgcggcgaacagaaattctgccgccacaatccagcgtaaataacgtttcatggctttatcgcctgaggttatcgtttgcccaggaaaccgcttgtgtccggttttttacggctatcttcttgaaaagattataaagatgcgttttaaccgtattttcgctgatgaacaacgaacgagcgatctcgttattagacgcgccgatacgcagcttattcaggatctctttttcccgatgagtaaggagggctgattccgtgctgttataacgatagttacctgaatgcgtaatcaggtagctggcaagcttttgcgtaaagtagcattcgccgcgcaggacgccttgcaacccattgacaacacgttcttgatcctccatggaataaaaaacgccgttgatatgaggccagttttcaatgtcgcggtacgggtaatcttcaggcgtatttagcaacaatattttgatattgttgtttttcctgctcaaagtatcctgccaataatagataagctttttatccgcttccatcatatccagaagaataatagagcctgaagagatatcgtccagagaacgttgaatattatgtaattttcctgtaattgccagcgattgtttaaggtgctgcaagagagctgtcgcctgcaaagaagatttagtgatcaacaataatgtatgaccatgaatactatggacttcattaaacatgatgaaaccccgctttttttattgatcgcacacctgacagctgcctctaaaatagaagcaccagaagtactgacagatgttgcactgctgtgtgtagtaataaatcagccctaaatgggtaaaatataaaactaatggattacatctgatttcaatctagccattacaaatcttaaatcaagtgttaaacatgtaactaaatgtaactcgttatattaaaatgttaaccttaaggttttattaagtttagaaatgatagaaaagttgtacatttggtttttattgcacaattttaaaaaaatcatacaaatggtgataacttactaataatgcatataaaaaatatttcggtgtagtcctttcgtcatgtaaaacgttcttgttttttctccacacctccgtggacaattttttactgcaaaaagacgaggtttgtcacggcttgtgcgcaagacatatcgcagcaatcagcgacgggcaagaagaatgactgtctggtgctttttgatagcggaaaacggagatttaaaagaaaacaaaatatttttttgcgtagataacagcgtatttacgtgggttttaatactttggtatgaactaaaaaagaaaaatacaacgcgcgggtgagttattaaaaatatttccgcagacatactttccatcgtaacgcagcgttaacaaaatacaggttgcgttaacaaccaagttgaaatgatttaatttcttaaatgtacgaccaggtccagggtgacaacatgaaaaacaaattgttatttatgatgttaacaatactgggtgcgccagggattgcagccgcagcaggttatgatttagctaattcagaatataacttcgcggtaaatgaattgagtaagtcttcatttaatcaggcagccataattggtcaagctgggactaataatagtgctcagttacggcagggaggctcaaaacttttggcggttgttgcgcaagaaggtagtagcaaccgggcaaagattgaccagacaggagattataaccttgcatatattgatcaggcgggcagtgccaacgatgccagtatttcgcaaggtgcttatggtaatactgcgatgattatccagaaaggttctggtaataaagcaaatattacacagtatggtactcaaaaaacggcaattgtagtgcagagacagtcgcaaatggctattcgcgtgacacaacgttaatttccattcgacttttaaatcaatccgatgggggttttacatgaaacttttaaaagtagcagcaattgcagcaatcgtattctccggtagcgctctggcaggtgttgttcctcagtacggcggcggcggtaaccacggtggtggcggtaataatagcggcccaaattctgagctgaacatttaccagtacggtggcggtaactctgcacttgctctgcaaactgatgcccgtaactctgacttgactattacccagcatggcggcggtaatggtgcagatgttggtcagggctcagatgacagctcaatcgatctgacccaacgtggcttcggtaacagcgctactcttgatcagtggaacggcaaaaattctgaaatgacggttaaacagttcggtggtggcaacggtgctgcagttgaccagactgcatctaactcctccgtcaacgtgactcaggttggctttggtaacaacgcgaccgctcatcagtactaatacatcatttgtattacagaaacagggcgcaagccctgtttttttcgggagaagaatatgaatacgttattactccttgcggcactttccagtcagataacctttaatacgacccagcaaggggatgtgtataccattattcctgaagtcactcttactcaatcttgtctgtgcagagtacaaatattgtccctgcgcgaaggcagttcagggcaaagtcagacgaagcaagaaaagaccctttcattgcctgctaatcaacccattgctttgacgaagttgagtttaaatatttccccggacgatcgggtgaaaatagttgttactgtttctgatggacagtcacttcatttatcacaacaatggccgccctcttcagaaaagtcttaatttgttgaaatatcgagcataagatgaatctggagagaatggtctgctgcgaatcagccaacctgaaagtatggataacacaaccctcaaggatgactaatcattgaggaaatagaataaatgttcagaccttttttaaactctcttatgctcggcagtttgttttttccttttattgccattgctggaagcaccgtgcaagggggcgtgatccatttttatggccaaattgtggaaccggcatgtgacgtcagcacccagtcatcacccgtagaaatgaactgcccacagaatggttctattccgggcaaaacctactccagcaaagcgttaatgagcggcaatgtcaaaaacgcgcaaatagcctcagtaaaagtgcagtatcttgataaacagaaaaagctggctgtaatgaacatcgaatataactaagtttctgaacaactcacgttgctgagcagaaaaatgcgatttaaccaaaaagcctgctgtacacttaagaaacaagaaggtgtaaggaggcgttatgaaaacgcgtattcatgttgtgcagggtgatattaccaaactggccgttgatgtgattgtgaatgcggctaatccgtcattaatgggaggcggcggcgtcgatggggccattcatcgcgcagcgggtccggccctgctggatgcttgtttaaaagtcaggcaacagcagggcgattgccctacggggcatgccgttattacgcttgcaggcgatcttcccgctaaagccgtagtgcacaccgtcgggccagtctggcgtggtggtgaacaaaacgaagaccagcttttgcaggatgcctatctcaatagcctacgactggtggcggcaaacagctatacgtcagtggcttttcctgcaatcagtactggggtttatggttaccctcgtgcggcagcggctgaaatcgcagtaaaaaccgtttcagaatttattacccgtcacgctttacccgaacaggtatactttgtctgttatgatgaagaaaacgcccacctctacgaaagactccttacccaacaaggagatgaatgatttgccccggctggcgagcgcggtgctgccactgtgttcgcaacatcccggtcagtgtggcctttttcctctggagaaaagtctggatgcgtttgccgcccggtatcgtctggccgaaatggcagagcatacgctcgatgttcagtattacatctggcaggacgatatgtcgggtcggttactgttttccgccctgttagccgcagcaaagcgtggcgttcgcgtccgtttgttgctggacgacaacaatacgcccggacttgacgacattttacgcttgcttgacagtcatccacgcattgaagtccggctttttaatcctttctcgtttcgcttgctgcgtccgcttggttatatcaccgacttttcccgtcttaatcgccgtatgcacaataaaagtttcactgtcgatggcgtggtgaccctggtgggaggacgaaatattggtgatgcctattttggagcaggggaggagccacttttttcggatttagatgtcatggcaataggacccgtggtagaggacgttgccgatgatttcgcccgctactggtattgcaaatcggtttcacccttacagcaggtgctggatgtcccggagggtgaaatggcggatcgcatcgagttacccgcctcctggcataacgatgccatgacgcatcgttatttacgcaaaatggaatccagtccatttataaatcatctggttgatggaacattgccgcttatctgggcgaagacacgtttattaagtgatgatccggcgaaaggggagggcaaggcaaaacggcattcactgttaccgcagcgcctgttcgatatcatgggctcacccagtgaacgcatcgatattatctcttcctattttgtaccgacacgcgcaggtgtggcgcaactcttacggatggtgagaaaaggggtaaagattgcgatcctaaccaattctcttgccgctaacgatgttgctgtcgtccatgccggatacgcgcgctggcgcaaaaaattgctccgctatggcgtggaattatatgaactcaagccgacgcgtgaacaaagtagtacgttacacgatcgcggcataaccggtaattccggagccagcctgcatgctaaaacctttagcatcgatggtaaaacggtgtttatcggctctttcaatttcgatccgcgttcaacattgctcaatactgaaatgggcttcgtgatagagagcgaaacgctggcacagttaattgataaacgctttattcagagccagtatgatgcggcctggcagctccgtctggacaggtggggacggatcaactgggttgatcgtcatgcaaagaaagagattattctcaaaaaagaacccgccaccagtttctggaagcgggttatggtcagactggcgtcgatattgcccgtggaatggttattgtaaatgtggcttaacgggctggtgctttatcgttctcacgcttaacaaccggtttaccagagaacaaaaacttcagtaacgggatgcgcaaatgaatttcatacagaattatcgcaatccctactacaaatatcaggccacagagaaaaccaagccagttggaggtgatgtgcggtgtaatgtatgcgccgaaaaacagcgttaacgggtggtgaaccagatagataaacagcgatgcgttaacaaaataagtcacccgcgctgactggaagttaagcaaacggtggccaaaggagaagaccacattcaccatccacagaccgaggaccatggtgatcaccgactcggtttcgtacatccaggcatcgccactgccatagcgctggttgagtaaataagcgacaaacgccaatgctgctgcaagggtacagccacgagacggcgtggtaaacaaggctttaagatgagggaaaatgaaagccagtgcgccgaggataaagaacggcaaataaaacagcgtttgcatgacaataaaattgaacatgccattactcagaatgggcggatacacaataaaaatcgttcttcttattaccgcataaccgatgccgaggcataaaaaaatcaccgatagttttaccatcgagaattttttattcgttttatcagaattttctaaattatttctgatgcgcttaaatatccatacgcacagcgtcgtcatgaccactaacaccagtaaaaaccacaggtgtgatattaattcccaggccaacgtattatatttgtcatacaatgacagcccaggccaactttccgcttttcctttgacatattgcagcataataaattgcggtaatgtcagtagggggatggctgttaacatcgggatacctacacgttcgacacgtactttccaccattttttcaagggatagcgtaaaaaaagcatgtaggaaaagtagccggatataacgaaaaatacctgcatgcggaacgagtggatgaagtcattaaaaagggtcagccacaatgatgattcggcgctattcacatgccatgtatggctcgaatagattaaagaaatatgaaaaggtatccctaacaacatcagccaggcgcggatggagtcgaggaaatattcacgttgcgcgggtactgggttcatatatggttaactaatctcggatttttcgtcttatccctgtcgggttatgcctttaggcttgttgccatagtgacaccgacctgaccgcgccaggcgcaggcttcaaggtttttatgcatagcatcatcgctaccactaaccagaatggaagcgtctgtaagacggttgataaataaatttgctggcaaaccctacacgaagtcgatgcttctgtctttaggagaagcacggaaagtgaaaacggttgcaatcaggtgcttaatccatgagccagcgtgctgaacgataccgggattctgttgtcggaatggctggttatccattaaaatagatcggatcgatataagcacacaaagggggaagtgcttactaattatgaaacataaactacaaatgatgaaaatgcgttggttgagtgctgcagtaatgttaaccctgtatacatcttcaagctgggctttcagtattgatgatgtcgcaaagcaagctcaatctttagccgggaaaggctacgagacgcccaaaagcaacttgccctccgttttccgcgatatgaaatacgcggactatcagcagatccagtttaatcatgacaaagcgtactggaacaatctgaagaccccattcaaactcgagttctaccatcagggtatgtacttcgataccccggtcaaaataaatgaagtgactgccaccgcagtcaaacgaatcaaatacagcccggattatttcactttcggcgatgttcagcatgacaaagatacggtaaaagaccttggctttgccggttttaaagtgctttacccgatcaacagcaaagataaaaacgatgaaatcgtcagcatgctcggggccagctatttccgcgtgattggtgcaggtcaggtttatggcctttctgcccgcggcctggcaattgataccgccttgccatcgggtgaagaatttccgcgcttcaaagagttctggatcgagcgtccaaaaccgactgataaacgtttaaccatctatgcattgcttgactcgccgcgtgcgacaggtgcttacaaattcgtggttatgccagggcgtgacacggttgtggatgtgcagtcgaaaatctatctgcgcgataaagtcggcaaactgggggttgcaccgttaaccagtatgttcctgtttgggccgaaccaaccgtcgcctgcaaataactatcgtccggagttgcacgactctaacggtctctctatccatgccggtaatggcgaatggatctggcgtccgttgaataacccgaaacatttagcggtcagcagcttctccatggaaaacccgcaaggctttggtctgttgcagcgcggtcgtgatttctcccgctttgaagatctcgatgatcgttacgatctccgtccaagcgcatgggtgactccgaaaggggagtggggtaaaggcagcgttgagctggtggaaattccaaccaacgatgaaaccaacgataacatcgtcgcttactggacgccggatcagctgccggagccgggtaaagagatgaactttaaatacaccatcaccttcagccgtgatgaagacaaactgcatgcgccagataacgcatgggtgcaacaaacgcgtcgttcaacgggggatgtgaagcagtcgaacctgattcgccagcctgacggtactatcgcctttgtggtcgattttaccggcgcagagatgaaaaaactgccagaggataccccggtcacagcgcaaaccagcattggtgataatggtgagatagttgaaagcacggtgcgctataacccggttaccaaaggctggcgtctggtgatgcgtgtgaaagtgaaagatgccaagaaaaccactgaaatgcgtgctgcgctggtgaatgccgatcagacgttgagtgaaacctggagctaccagttacctgccaatgaataagacaactgagtacattgacgcaatgcccatcgccgcaagcgagaaagcggcattgccgaagactgatatccgcgccgttcatcaggcgctggatgccgaacaccgcacctgggcgcgggaggatgattccccgcaaggctcggtaaaggcgcgtctggaacaagcctggccagattcacttgctgatggacagttaattaaagacgacgaagggcgcgatcagctgaaggcgatgccagaagcaaaacgctcctcgatgtttcccgacccgtggcgtaccaacccggtaggccgtttctgggatcgcctgcgtggacgcgatgtcacgccgcgctatctggctcgtttgaccaaagaagagcaggagagcgagcaaaagtggcgtaccgtcggtaccatccgccgttacattctgttgatcctgacgctcgcgcaaactgtcgtcgcgacctggtatatgaagaccattcttccttatcagggttgggcgctgattaatcctatggatatggttggtcaggatttgtgggtttcctttatgcagcttctgccttatatgctgcaaaccggtatcctgatcctctttgcggtactgttctgttgggtgtccgccggattctggacggcgttaatgggcttcctgcaactgcttattggtcgcgataaatacagtatatctgcgtcaacagttggcgatgaaccattaaacccggagcatcgcacggcgttgatcatgcctatctgtaacgaagacgtgaaccgtgtttttgctggcctgcgtgcaacgtgggaatcagtaaaagccaccgggaatgccaaacactttgatgtctacattcttagtgacagttataacccggatatctgcgtcgcagagcaaaaagcctggatggagcttatcgctgaagtcggtggcgaaggtcagattttctatcgccgccgccgtcgccgcgtgaagcgtaaaagcggtaatatcgatgacttctgccgtcgctggggcagccagtacagctacatggtggtgctggatgctgactcggtaatgaccggtgattgtttgtgcgggctggtgcgcctgatggaagccaacccgaacgccgggatcattcagtcgtcgccgaaagcgtccggtatggatacgctgtatgcgcgctgtcagcagttcgcgacccgcgtgtatgggccactgtttacagccggtttgcacttctggcaacttggcgagtcgcactactggggacataacgcgattatccgcgtgaaaccgtttatcgagcactgcgcactggctccgctgccgggcgaaggttcctttgccggttcaatcctgtcacatgacttcgtggaagcggcgttgatgcgccgtgcaggttggggggtctggattgcttacgatctcccgggttcttatgaagaattgccgcctaacttgcttgatgagctaaaacgtgaccgccgatggtgccacggtaacctgatgaacttccgtctgttcctggtgaagggtatgcacccggttcaccgtgcggtgttcctgacgggcgtgatgtcttatctctccgctccgctgtggtttatgttcctcgcgctctctactgcattgcaggtagtgcatgcgttgaccgaaccgcaatacttcctgcaaccacggcagttgttcccagtgtggccgcagtggcgtcctgagctggcgattgcactttttgcttcgaccatggtgctgttgttcctgccgaagttattgagcattttgcttatctggtgcaaaggaacgaaagaatacggcggcttctggcgcgttacattatcgttgctgctggaagtgcttttttccgtgctgctggctccggtacgcatgctgttccatacggtcttcgttgtcagcgcgttccttggctgggaagtggtgtggaattcaccgcagcgtgatgatgactccacttcctggggtgaagcgttcaaacgccacggctcacagctgctgttagggttagtgtgggctgttgggatggcgtggctggatctgcgtttcctgttctggctggcaccgattgtcttctcgttgatcctgtcaccgtttgtttcggtgatttccagccgtgccaccgttggtctgcgcaccaaacgctggaaactgttcctgatcccggaagagtattcgccgccgcaggtgctggttgataccgatcggttccttgagatgaatcgtcaacgctcccttgatgatggctttatgcacgcagtgtttaacccgtcatttaacgctctggcaaccgcaatggcgaccgcgcgtcaccgcgccagtaaggtgctggaaatcgcccgtgaccgccacgttgaacaggcgctgaacgagacgccagagaagctgaatcgcgatcgtcgcctggtgctgctaagcgatccggtgacgatggcccgtctgcatttccgtgtctggaattccccggagagatattcttcatgggtgagttattacgaagggataaagctcaatccactggcattgcgtaaaccggatgcggcttcgcaataaaaacgtagttgcctgatgcgctacgcttatcaggcctacatcgttcctgcaatttattgattttgcaagactttgtgggtcggataaggcgttcacgccgcatccggcaaaaacaacgagccaataaaaataccggcgttatgccggtatttttttacgaaagaggtatcaaatgcgtttaattgtggtgagcatcatggtgaccttgctgagtggctgtggcagcattattagtcgcactataccggggcaggggcatggcaaccaatattatcccggtgtgcaatgggatgtgcgtgactccgcctggcgttatgtcacgatccttgatctgccattctctctggtttttgatactttactgctgccgatcgacattcatcatggcccgtatgagtgattaacgttcatcccactcatcagctgctgcgcgtccttcctcggtatccagcggtggctcaagctgaaattccccctcgtcccattcatgtaatgtattctcttcctgccactcctggcgtatctctatctcatcatagtcgccatcaaaaacactttgcgcggcttcaccgctaagcataggtaaacattcaccttcttccccttcgtcggcaaaaaactcaacttgccacatgatgtcgccgtcctgcaaaacgtatttttgggcattgaactgttgcacattcgcatcttcggcgtcgatgccggggttgtctgcaagaaattcttcgcgtgcagcgtcaatggcttcttcaagcgttgcgtacatggtcatcacgattctccctttgagttgatgaggtttcagggaaaaggatagctgattctccgcttttgcaagtatgaaaggcgaaaaatcagttcgatacctggggtattcgacgacgacgtagactgttccatgaatagactgcgttgaataacactacgccagcggtgacgagaaataccgctctgaaaccgtagttcgctgaaatcgctgctcccatcaatggtccggtaacgttgccaatatcacgaaacgattggttatagctgaagatacgcccggcgatctggttgctcgagttgtaaaccaacagtgtctgtacggcggggagtagtgcaccatcggcggcaccgagcaaaaaacgtaaaatcccaagttgcaatggcgtctgaacgtaagacattgggatcaacagcagtacagaaaagatcagcgctgtaatcaggatcttttcgggtccgattcgatcgccaagtttgccgagtcgtggtgcacttagcagagccgccacgcctggcaccgaggcgatcatgccactgataaaggcgacgttactgacgttacccgccagttcgcggacatacagcgtcagaatgggggcaattgagcccgtcgccacctggatgattaacgtagtgacaaacaggctgagtaccagtttcgggtttttaagtgatgtcaccacttcccgcatgtgcagcatctcttttttgctgaccggctggaatttttctctgatgcaaaacagggtgacgaaaaagcagagtatgagcacactggcggtaataaagaataccggacgtaagccgtagctatcggcgagcaggccgccagccattgggccgagcaacgcaccactaacgccgcctgtggagagcgtacccagcgcccagccgcttttattacgcggtacttgtgtggcgataagagcattagcgttggggacaaatccgccaagtaacccaagaagcgcccgcaggatcaaaaactgccagatattttgtgccagccccatcaacaccatcacgatgcccatgccgagggcagagcgtaatagcatgagttttcggcctttacggtcggcgagtccaccccaaaacggtgaggcgatggccgaaaataaaaatgtaatgctgaagacaataccggaccacatattcagggcggagtgaccggtaacgccaagctgctcaacgtagaggggtaagaagggcattaccagactgaaggcggcaccggtaagaaaacagcctagccaggcgacgatcaggtttcgtttccagtttataggggtgtcattttcacagggtgacatagcaatccgctgttggtgcgccaggcgcggtgaacataagaagaaaagataagcacactaattatgcgcccgacttccagggggcgcaatccagagagcttttatcgctaaatcagggggatttgctgtggtaatgccggatgccattctgaagcatccggcatgggagatttaatagcgtgaaggaacgccttccgggcgtgttttaaagcgacggtgtaaccacatatactgctctggtgccatcatgatgcatttttcgaccactttgttcatccacgcggcggtagtttcggcatcatccagtggcggagaacactctggcggcagcataatcaattgataccctttgccatctggcttacggcgtggaacgaagggcaccagacatgcgccggacatccgtgccagcatccaggttccggtcgtggtcgcagcctgctcaacggcaaacaacgggacgaaaacgcttgagcgcgggccgtaatcatgatccggtgcgtaccagaccacttcgccttttttcagggctttaatcatgccttttaaatctttgcggtcgagcatcgatttatttgagcgcaaacggccccaggtttgtagccagtcaatcagtggattatcgttcgggcgataaacgccaatacccggttcctgcataccaaactgccgcgcacccagctccagtgtcagaaaatggatgccaactaacaggatgccgcgtttttgcgcctgcacgtcacgaatgtgttccatgccgatcacttccgtccagcgggcgattcggcggtccggccagaaccacgccatgccggtttccatcaggcccatgccaacggattcgaaattcttcaccaccattttacggcgttcttgttcgctcatttccgggaagcacagttccaggttgcgatgcacaatttttgcgcgtcgtttcataaaacgtaacgccagttttcctaatccacaaccgaggcggtagataaccgggtagggcaattgcacgactaaccaaagtacgccaatacccaaccaggttaaccaataacgcggatgaagcagtgcggtggagaacttgggtagattcgtcatatcaatcctgtttttcaacctattcgggcaattgtatgtattgtcgcattttttcgcccgcaaccaaaatttgtggctgaagactgggcgaaattgccgcgcttgtaaataacaaataatttttaatgcgcaaatgtagcgtaaaatgtgtggatgttaattatcgataattgctatatcatgccgcggatttttactttcccatctcgcaggaaccgtacaccatgccagtgttacacaaccgcatttccaacgacgcgctaaaagccaaaatgttggctgagagcgaaccgcgaaccaccatttcgttttacaagtatttccacatcgccgatcctaaggcgacccgtgacgctttatatcagctgtttaccgcgctgaatgtttttgggcgagtgtatctggcgcatgagggcattaacgcgcaaatcagcgtacctgcgagcaatgttgaaacatttcgcgcgcagctctatgccttcgacccggctttagagggtttacgcctgaatatcgcgttggatgatgacgggaaatccttctgggtactgcgcatgaaggtacgcgatcgcattgttgccgacggtattgacgatcctcactttgatgccagcaatgttggtgagtatctgcaagcggcggaagtgaacgccatgcttgacgatcccgatgcactatttatcgacatgcgtaaccactatgagtatgaagtggggcactttgaaaacgcgctcgaaattccggcagataccttccgtgagcagctgccaaaagcagtcgagatgatgcaggcacataaagataaaaaaatcgtcatgtactgcaccggcggcattcgttgtgaaaaggccagtgcctggatgaaacataacggattcaacaaagtctggcatatcgagggcggaattattgaatacgcccgtaaggcgcgcgagcagggcttgccggtgcgttttattggcaaaaattttgtttttgacgagcggatgggcgaacgtatatcggatgagattatcgcgcattgccaccagtgcggcgcgccgtgcgacagccataccaactgtaaaaatgatggctgccacctgctgtttattcagtgtccagtatgcgcggaaaaatacaaaggttgttgtagtgagatttgctgcgaagaaagcgcgttaccgccagaagaacagcgacgccgtcgggcaggacgtgaaaatggcaataagatctttaataagtctcgtggacgtctgaatacaacactgtgcattcctgatccaacagaataaatatcattgccggatgcgtgccatccggcaacatttcacgcttacttctgctgtacgccttccactgaaataatcagatccacttcctgagaagctggacctaaatctgtcttgatattgaagtccttgagcttaattttgccttcggcctcgaagcctgcacgtttaccaccccatgggtcgtcgccctgaccaattaatttcgcttccagcgtgacgggtttggttacgccattcagcgtcagatcgccggtaatatccagttcgtcaccgtctttcttcacgctggtggaggtgaatgttgcctgtggatattttgcggtattgaggaaatctgcactgcgaagatgtttatcgcgttcggcgtgattagtatcgacgctggtggtgttaattgtcacattcactttatcggcagccggatttttttcgtcaaaggtaaaagtaccgtcgaaatctttaaaggtgccgtataaccagctatagccaaggtgctggatgcggaaattaacaaaggcgtgctgaccttctttgtcaattttgtaatcggcggcaaccgctgaaccggcagagaacatcagggacgcgaaggttaaaccaagcaggctttttttcattttttatactccatagtcagatgacgactttcccagcatgcgcttcagagtgtcgtctttatcgatgaaatgatgcttcagggccataaatccgtgcataacggacagtactacgacgctccacgcgagccaaaaatgcagggcaccggcaaagtctgcctgtgcgccagcgtcggcaagggtcgcggggacgtcaaaccagccaaaaacgctgatcggtttaccatcggcagttgagatcagatagccgctgatgccgatggcgaaaagcaataggtacaatgcgagatgtccagctcttgcggcaagacgagtcatgggcgaataactcggcagcggacccggcggtggagatatgacacgccacagaacgcgaataaccagcccatcattaacaaaataccgatgcttttatgcagttcgggtgctttgtgataccagccatcgtaataactgagcgtgaccatccacagacctaaagcaaacatgccgtagacaataattgcgcttagccaatggaaggccgcagatataacaccatagcgttcaggggtatttgtgaatgacataagtgcatccaaaacgaatttgcgagagaaagaaaatggcgtgtcggagaatgaattgcaacacaaaaataacaaattgaatgatatttatttttatttcaataattttgaattaataatgaaagaatcttcataagtttagtgggttcagcatcagagatgtctggtgagtgctgtagaagcaggaataatctcattcaatttttcacgctaaatgaaagggagattaaatatttgtcagtttatgtcagtgcggaaaactaaaaataaaacacatagatcagatccataattgccaacaatccccagagaaaaagataaagcatcagatgctcgcgaatattattgatgagatagtgcaacagccgacgcattaaatactcctgtaaaaacggcctcattctggaggccgtaatgatgattattggaagcgggaaagcctgaatggcgtcaaatcaaaatcgctttttttgtcttgcgcaaaatcggcagctatttcccctaaaactgacgcaaatttaaaaccgtgcccactcaggccggtaatgagcagtgtattatcgtggccgggtagggtatcgataataaaatcttcgtcaggcgaattatcataggtgcaggcagcgccgtacaggcagcaaccgatacccggcaatacattgcgcaagaacgggaaggcttctgacccatcactggccacttccgcaaacggaacacgttcatccgctgaatggataacctggcctccgttatgtttgccaatcttcaacgcgtcgttttctgccggaaaaccataatattgatcgccattgggcagttcaccggtaaacgccgggaatttattcttcacgctatagcggccatcggcctgataccaggcaaatactttgcgtacgggctggacaggcagctccgggagcaggtcttttacccatgttcccgcgcagacaatcgcttttttcgcctgatactcaccgtcagccgtttcaatagttacgccatcatcgtcatgacgaattgcggtgaccgggcagttgaacagttgcgcacagcccgcttccttcgccagttggatccaggttttaatcgccagttcgctgcgcaaaaaaccggaatcagtttcaaataagccgatgtagttgtccgggacgcgtatttccggccagcgggccataatcccttgcgcatcgagcttttcaacgttgagttgccattgttcggcgctgtgggcgacgttggcgagaaatgtggaatcagccgggccaaggttaatgacgccagagcgtacaaaaatgggatcttcttcgttgtggcgggagagttcatcccacagcgtttgcgcgcggaggaccagcgggacatacttttcgccttcaccataagcatggcgaattaatcgcgtatcgccgtggtggctgccgtgttgatgcggtggcatatgggcgtcggtcattagcacgtttaaaccggcgcgggttgcataatacccggcggcagcgcctacggaaccgctgccaataatgatgagatcgtatttcatttttttctctctgctctcatggtttaagcagagtaattaactgaatgcagatatacaacccagaaatggtaaaggcaccggtgaggtgccttttgggtggatggtcatgtcatgttaatgacgccgatactcgtttacctggaaatcaccggattcaattttggcgattcctgcttctaatatcgaaataaattgtctggcaacatcagtggttaaccagagcgtctgaccaacttcagtcccttcctgctcggacttatttggggtctggtagtgcaaacgcaacatcagcgcatcatagctatcaacggtgctgatgtcccaccctacgagcggatgagtctgaatgacttcattatttttttccatcatggccccctaattcgtgttactagacaacgttattcgaggttcaatgcgtttttatctgaagcaacttcagtataccaataagtaagggtattcaccgaatttttaaagggggaaacagataaatttctgcttttaagatttatatgaacaataaaacagcatgtcattcatatttttttagcatattgtgcaattattttgaggaagtgtagaaattttgtactcaaaattcgtaagtaaaataaaaaagccggggcgacccggcaaaaaaaaatcactgcatattattcgctgacaaaccagtcatcggcgctttcccacgtttcctggagaatttcactaatgcgctgtttatcttcttttgtcgcgccaataaccgataaattattcgctgcggcataacgtaccgatacgtggccttcattatcaggaaacgcatactgaatacggcgggaaagttcgccagccagggcgtcaatagccccagctggcaatggagaagttttcgctatggtgacttcaattcgcataatagccccctgttgaatatactggttatttatacaggtaaaataacctaatgacaacaggaagctacgatttttattgtttaacggaccagcgtaccgtttccccggcgaggaatggcaccagcgtgtcatcagtcagtgcgatgctttcagcaacctgttgctcttcacgtaccagttcgatgaatgtgtcgttgaccggcaacccatagaactgcgggccgtttacagaacagaatgcttcaaagtgctgcaaagcattcatttcttcaaagacggtagcgtaactgcccagcgcggttggggcgttgaagcagcccgcgcagccgcaactgctctctttgcgatgacgtgcatgtggcgcagaatccgtaccgaggaatactcgattaaaaccgctggcgaccagttcacgcaatgcctgttggtgaatattacgtttgaggatgggtagacaatacaggtgcggacgcacgcctccaaccagcatatggttgcggttaaacatcagatgctgcggagtgatggtggcagccagccgttcatttccgtcacggacatagtcggcagcatctttggtggtgatgtgctcaaaaacgactttcagcgcagtcaggcgctggcgcagaggttccatcacgctttctataaagcgcgcttcacgatcaaaaatgtcgatatctgcatgtgtcacttcaccatgcaccagtagcggcataccgattttttccatgcgctcaagtaccggcatgattgcgtcaattgacgtcacgccgtggctggagttagtggttgcgtttgccgggtaaagttttgcagcggtgaacacgccttcgttaaatccgcgctccagctcattaggatccagcgaatctgttaaataacaggtcatcaatggggtgaaatcgtgcccggcaggtacggcgtcaagaatacgctggcgatacgccacggcagcctcaacggtggtcacgggcggagccagattgggcattacgatagcccgtccataaatttcgctggtatatggcacgacagtttttaacatgtcgccatcgcggaggtgaaggtgccagtcgtctgggcggcggatctttaatacctgggatggtgcagtcattaatctctatgctccggctgaagggatgtttttgccggacacaaaggataagcggaaacgttttcctttgcacgaaaaataaagggcgcgaatgcgccctcgtgattaatcagtaaatggaatgacaatttcgcctggcttcacttcaatgcctttcgccagttttttcgccattgcttcgccctggctgccatcttcgcgcaggacgtaagcaggttgctggttaaagtaattgcgtaatgcctggttcaaatagggaagcaacgtttgcatcaccgtttgcattttttccggttgtaccgtcgcatcgaccacttccatctctttcaggaagatcgcacctttttctttatcaaacacgggcagcgctttcagcttcagtttcatggtcgctttctgactaccgaacagggagttcatgtccagattggcgtctccggttagggtaaccttattcggctcttcgcgaccaatttggctggtcaggtttgtcagaacaatatgggcgtcagccacgccgggtaaaccgatatcttttgagaaattattatgtttcgcaagcgactggttaatttcttgttcggtgatggtgtattgggtgagttgattacagccaacgagcaggccactgacgatcaatgcagcggcaaataaaaacttgttcatggtagtcctcgacatgaaatctgcgtcaatatcctgacacaacgcagcatgtgtcaccagcgataaactcgccagcagaaaaaactgaaaacggcggcaacccgcgaatacaggctgccgcggcgggtcaggattaaatcgccattgatgataacaaattgatttgtgtctgtttcgccatattatcgcggtaatcagcaacgcggcttggccagttaattccggctaccagcgtcagattacgcagtagcgggaatagctgaatatcatcttccgaaagttcgccattcacggcgttcggtttgacgatcagtttgtccagcgcacgtaaatcatcgctgatattcttaatcagaccgtcagagtgggccagcaggtcggcaaaattacccgcgctggcctctttcttgtcgacgaaatatttgcgcgcggcgggagtagaaaactcatcaaatgccgatttggcaaaacgcggcaacagcagtttgttggcgtagccattgaccttgcgcagccactcttcaatggcaggggaacgtttgccggtcagtaacggtttgccgttgagtttatcgacatagtgaacgatgtccatgctttctggcatatagcggctgtcatctttttgcagaatgggaacctgtttttgaccgaccatccgggtgggtgtttctgcgtcgtcgttgagcagaacatgtaattcgacggggatatttttcaggccgaaaatcatgcgggctttgaggcagtaagggcagtgatcgtaaatgtatagcttcacgtgactcctccatttggctgtcagttcactttcagtatggaggagtcaggggggagtatcaaatcaggcgtcgcgttcaagcaaacgacgcgcggcgcgtttctggctaaactgccaacccagcgcaaggaaagtgaagatgccaataatgcccagcatcatccacggaagctctggctggtgcgccgatttgcccaggtcaaacagccagccgccaccgatataaccaatagcgccgccaatcgccagacccagacggctaaaccccatatagctgccgcgagctcttgcgtccgccagcgaagcacttaaggtttcacgcgcaggctcggcaatgatcgacccgatataaaacagacaaatcagggtgaaaagttgttgcaggccgctgaccatgcccaccggcatcatgcttaatgacattatcaacagcccagccatcaaccggtgttccagacgaaaatgcttttcactccagcgggcgatagggtagagcaacgttaacgacagacacgcttcaatggcatacatccatttaacggcagagggcgcgccagccacgtcgttgaccataattggcagcatcagcatcacttgtacagccagcatgtagtaacccgccagcgtcagaacataggtgacaaaacgcttgtcacgcatcacgcgggtcatgccttcgcgaacgggcgtgcgtacggtggagagtttccatgctggtaacaaccacgcattgaacgccgcacatagcacaaatagaactgcccctgtggcgcagaccaggcgaaagtcgtattgcaacagccagctccccaacaatgcgccaatgaccgcaccggcactgtcctgcatcatcaacagcgagaaaaaacgaccacgctgctgtggacggattaatttcaccaccagcgccgaacgcggcggatcaaacaacgtgccaccgagtcccgagagcaggcatgaaaaccacaatagccacggttcgtgggcgatacccattgtggcgaatccggcggcgcgcatcagcataccggtaacaatcatcggtttggcaccaaagcggtcggcaattgcaccgccgaaaatacccagaccttgctgaataaattggcgtagaccgagagcaataccgaccatgacggcggcccagcccatttgatcaacgaagcggatagagatcagcgggaagacaacaaagaaccccagcacgaccagcatattatcgatgagcaggaaatatttacccaggttcctcgcctgcgacacgcgggacatttcccctcccgggaaataaaagatgagcactttctattctgcattgccgctaagacttttcccatcacttcggggacaatatttttttatcaaaacgtcgctttgatagagagtttttatcaaatatgtgaataatgcagaaaatggcattttggacttttcacagggtctggttgcgcaggtatagtaatacttacagcgtattaaagacgttacgggaaggagtaggtatagaatgtttggctatcgcagtaacgtgccaaaagtgcgcttaaccacagaccgactggtcgtgcgtctggtgcatgatcgtgatgcctggcgtcttgcggattattacgcagagaatcgccatttcctcaagccctgggagccagtgcgcgacgaaagccactgttatccatcaggctggcaggacaggctggggatgattaacgaatttcataaacaaggttcagctttctactttggcttattcgacccggacgaaaaagagattattggcgttgccaatttttccaatgttgttcgtggctcttttcatgcctgctatctcggttattcgattgggcaaaaatggcagggcaaaggactcatgtttgaagccctgaccgcagccattcgttatatgcagcgcacccaacatattcatcgcattatggctaattatatgccgcacaataaacgcagcggtgatttactggcgcgactgggttttgaaaaagaaggctatgcgaaagactatctgttgattgatggacaatggcgcgatcacgtactgacggcattaactaccccagactggacgcccggccgctaaggagaatctcatgaaatatcaacttactgcccttgaagctcgcgtgattggttgcttgctggaaaagcaggtgaccacgccggagcaatacccgctctcagtcaatggtgtagtcacggcctgtaatcagaaaacgaaccgtgaaccggtcatgaatctgagtgaatccgaagtgcaggaacagctggataatctggtcaaacgtcattatctacgcacagtgagcggttttggtaatcgggtcaccaaatatgagcaacgtttttgtaattcagaatttggcgatctgaaactgagcgcagcggaagtggcgttaatcaccacgttgttattgcgtggtgcccagacgccaggtgaactgcgcagccgcgccgcgcgaatgtatgaattcagcgatatggcggaagtggagtcgacgctggaacaactggcaaatcgcgaagatggtccttttgtggtgcgtctggcccgcgaaccgggtaaacgcgaaaaccgctacatgcatcttttcagtggtgaggttgaagatcagccggcggtgacggatatgtcgaacgcggttgacggtgatttacaggcccgcgtcgaagccctggaaatcgaagtggcagaactgaaacagcgtcttgattcgttgctggcccatctgggagattaaagtgaaaaaattacgtatcggcgtagtgggattaggtggcattgcgcaaaaagcgtggttaccggtgctggcggcagcgtctgactggacgttacaaggagcctggtcgcctacgcgcgcgaaagccctgccaatttgtgaaagctggcgcattccttatgccgattcgttatccagccttgccgccagttgcgatgcggtttttgtgcattccagcaccgccagccactttgacgtggtcagtacgttactcaatgcgggggtacatgtctgtgtcgataaaccgctggcagaaaatctgcgcgatgctgaacggctggtggaactggcggcgcggaaaaaactgacgttgatggtcggttttaaccgtcgtttcgcaccactctacggtgagttaaaaacgcaactcgccaccgcagcctcgctaagaatggataaacatcgtagcaatagcgtcgggccacacgatctttatttcacgttgctggatgattatctgcatgtggtggataccgcgctgtggttgtcgggcggcaaagcctctctggatggcggtacgctactgactaacgacgctggcgaaatgctgtttgccgagcaccatttttcggctggtcctttgcagatcaccacctgtatgcatcgccgtgccggaagtcagcgtgaaaccgtgcaggccgtgactgacggtgcgctcatcgacattacggatatgcgcgaatggcgtgaggagcgcgggcagggcgtagtgcataaaccgattcctggttggcagagtacgcttgagcaacgtgggtttgtcggctgtgcgcggcacttcattgaatgtgtgcaaaaccagacagttccgcaaaccgccggcgaacaggccgtgctggcgcaacgtatcgttgacaagatctggcgcgatgcgatgagtgaataaaccctgtaacatctggcggtagcaattcaccataatccaggtagactattcgcctctttcagcgcctgccttgcaggcgttttgcccgtgggtctggattagaacaccgatgaatttattaaaatcgctggccgccgtcagctcgatgaccatgttttcgcgtgtgcttggcttcgcacgagacgcaattgtcgccagaatctttggcgcagggatggcaaccgacgcctttttcgtcgcttttaaacttcctaacttgttacgccgtatctttgccgaaggggcattttcccaggcatttgtaccgattctggcggaatataaaagtaagcagggtgaagacgccacgcgggtctttgtctcttatgtttctggcctgctgacacttgcgctggcggttgtgacggtcgctggcatgctcgccgcaccgtgggtgatcatggtgaccgcgccaggcttcgctgacacagctgacaaatttgccctgaccagccagctactaaagattacctttccctatatcttgctgatctccctggcgtcgctggtgggagcgattctgaatacgtggaaccgcttctcgattccggcgtttgctccaacactgcttaacatcagcatgattggtttcgcgctgtttgccgcaccgtactttaacccaccggtgctggcgctggcgtgggctgttacggtcggcggcgtcctgcagctggtgtatcagctaccgcacctgaagaagatcggcatgctggtcctgccgcgcattaacttccacgatgccggagcaatgcgcgtggtgaaacagatgggaccggcgatccttggcgtctctgtgagccagatctccttaatcatcaacaccatttttgcctcgtttcttgcttccggttcggtgtcttggatgtattacgccgaccgcttaatggagtttccgtccggtgtgctgggcgtggcgcttggcaccattttgctgccgtcgctgtcgaaaagttttgccagtggcaatcatgatgaatacaaccgtttgatggactgggggttgcgtctttgtttcctgttggcgctgccgagtgcggttgcgttgggcattctttccggtccgttgaccgtttcgctgttccagtacggtaaatttaccgcgtttgatgcgctgatgacccagcgggcgttaattgcctactcggtgggtttgattggcctgattgtagtgaaagtgttggctcctggcttttattcccgccaggacattaaaacgccagtgaaaattgccatcgttacgctgattttaacgcaattgatgaacctggcgtttattggtccgttgaaacatgccgggctgtcactttctattggtctggcggcgtgtctgaatgcttcgctgctttactggcagttgcgtaagcagaaaatctttaccccgcaacccggctggatggcgtttctgttgcgtctggtggtggcggtactggtgatgtctggcgtgcttttaggtatgttacatatcatgccggagtggtcattgggtaccatgccctggcgtttactgcgtttaatggcggtcgtgctggcggggattgccgcgtacttcgctgcactggcggtactgggcttcaaagttaaagaatttgcccgccggacggtgtaacaatgcattccggcctgcagtgcaggccggagataatcttcagatcgaaatctttttaccgccgcgatgggttgttgaggtctgaccgttcgccccatatagcgtcggttcctgatgcggtttcaacatttccagcgcctgttgattgcgctcaatctgtccttccagtaaccagccgttatgttgattcatttggcgtagttgctgcgttttcacagtaatttcctgccagcgttgattaatatcaacgctatttgctgtattgggttctttcctgcgtaactgttcgaggtaatccagcgtcgccagcagtgagcttttttgttctgtaatccattgcaactggctgccgttgatctgccccatagagagatgttgctgctcttgatccattaccgttttgagatcgttaagcacagcggacatctggtcgaggatctctgcaagacgtgtcatacgatcagttactctgcaagtcttgctgcgcttcgttgatcagcgcatcggcaattttgccggtgtccatttttagttcaccgttacgaatcgccagttttaacgcttcgacacgttcaagattgatatcactgctgctgggttgcatcagttttgcttgcgcgtcgcttaacgtcacactggtgctggtggaggcggttgtttttgccgcccggctgttcgttaccggcgcgtcagtggtttcgcgcggttgaacggtgcttacaggcttcagaggcgaagtgcgatcaatactcatggtttattcctcattgagggcgcttttatcatgtgttgcttatttatcggcaagggacgggtaatctttaacagcttacaggtttataagaatattcccatctgcatcaacaacgccgctgactacctgtcccgataccatgcgcacccgcgcattctgtgcgacggctgcattgttcagcgcctgaccttctgcgttggcgctaaacccatcaccgctggcgatcacattgacgcgttgtcccgcttttacccgccatgcctggcgaaactgggttaactggataggttgatcgggtgatagatcgcgcaggctaatggcatcaacaagttgattgatatccagcaccgtacgcggtggcagggtatccagccgtccgcgtttcagtttgacattgccagcttccagctttcctccccgcgcaatgggcatcgcggcaaccacataatttcctgtggcctgtacattaacctgtaaatatcgtttgtcgttaccgcagcgtgccaacacattcacattgccccacaggcgggaattattgctcatcgaaagcaatggctgctcgcatggcggtagtagattgggcgctgtacgaatagaaacacgaacctcatcacttacccccgcgagttgggcgctaaaaaagttgtgcaattgcgatgtgagattgctcgccgtacttaacggactgaacagtatcgcgatgatcgccacgctacgttttattatcagcattttcgcccccagccatttctacaacgtgaattgtacctgtccgcaatgaccatcaacggcataaatagcgacccattttgcgtttattccgccgataacgcgcgcgtaaaggcatttaagctgatggcagaattttgatacctgcggaggagatatgctcgataagctcgacgccgccttacgttttcaacaagaggcgctcaatctgcgcgcccagcgtcaggaagtgctggcagcaaacatcgccaatgccgatacccctggttatcaggcgcgcgatatcgattttgccagtgaacttaaaaaagtcatgcaacgtggacgggatgcaaccagtgtggttgcactgacgatgacctcaacgcaacacattccggcgcaggcgctgacgcctcctaccgcagaactgcaataccgtattccggaccagccttcgcttgacggtaataccgtcgatatggatcgcgaacgcacccagtttgccgataacagcctgcaataccagatgagccttagcgcgttgagcgggcaaatcaaaggcatgatgaacgttttacagagcggaaattaacggatggcactgctgaatatttttgatatcgccgggtcggcgttaactgcccagtcccagcgcctgaacgtggcggccagtaatctggcgaatgctgatagcgtgaccggtcccgatggacagccatatcgggcaaaacaggtggtattccaggttaacgctgcaccaggtgctgcgacaggcggcgtaaaggttgccgatgttatagaaagtcaggccccggacaaactggtttatgaaccgggtaatccgctggcagatgcaaagggctacgtaaaaatgccgaacgttgatgttgtcggagagatggttaacaccatgtcggcgtcacgcagctatcaggccaatgttgaagtgctcaacacggtgaaaagcatgatgctgaaaacccttacgctcggtcaataaaggagaaagctatgtccattgcggtaaccaccaccgatccgacaaataccggcgtcagtaccaccagcagtagttcgctcacgggcagcaacgccgcagatttacaaagcagttttctgactttgctggtggcgcagctgaaaaaccaggacccgaccaatccaatggaaaacaacgagctgacgtcgcaattggcacaaatcagcacggtcagcgggattgaaaaactcaataccacgctcggatctatttccggacagattgataacagccagtcgttacaggccagtaacctgatcggtcacggcgtgatgatccccggcaccactgttcttgcgggaaccggcagtgaagaaggggctgtgaccacgaccacgccgtttggtgttgagctgcaacaggcggcagacaaagttacggccaccatcaccgataaaaatggcgcggttgtgcgcaccattgatattggtgaactgaccgccggagttcacagtttcacctgggacggtacgttgactgatggcagcactgcgccgaacggttcttacaatgtagcgattagcgccagtaacggtggtacacaactggttgcccagccgctgcagtttgctctggtgcagggtgtgatccgcggcaacagcggtaatacgctggatctcggcacttacggcaccaccaccctcgacgaagtacggcagataatttaagccttcacatttcaggagtcagtcatggccttttctcaagcggttagcggattaaacgctgccgccaccaacctcgatgttattggcaacaatatcgccaactccgccacctacggctttaaatcaggcacggcctcttttgccgatatgtttgccggttcgaaagtgggactgggggtaaaagttgccggtatcactcaggactttaccgatggcacgaccaccaacaccgggcgaggtctggacgttgctatcagccagaacggttttttccgtctggtagacagcaacggttcggtgttctacagccgtaacggacaatttaagctggatgaaaaccgtaacctggtgaatatgcaaggtttacagctgacgggttacccggcaaccggtacgccgccgactattcagcaaggggcgaatccgaccaatatttcgatcccgaataccctgatggcagcgaaaactaccaccacggcatcgatgcagatcaacctgaattccagtgatccgcttcctactgttacgccattcagcgccagcaatgcggatagctataacaaaaaaggttcggtgactgttttcgacagtcagggtaatgctcatgacatgagcgtctactttgtgaagaccggggataataactggcaggtctacacccaggatagcagtgatccaaacagcattgcgaagacagcgacaacactggaatttaatgctaatggcacattagtggatggtgcgatggcgaataatatcgcaaccggcgcaattaacggtgcagaacccgccacgtttagtctgagcttcctcaactccatgcagcaaaataccggcgctaacaatattgtggcaaccacccagaacggctacaaaccgggcgatctggtgagttatcaaatcaatgatgacggtacggttgtcggcaactattccaacgaacaaacccaactgctggggcagattgtactggcgaactttgccaacaacgaaggtctggcatccgaaggcgacaacgtctggtctgcgacgcaatcttctggcgtggcgctgttggggacagccgggacgggaaactttggcaccctgaccaacggtgcgctggaagcgtccaacgtcgatctcagtaaagaactggtcaatatgatcgttgcccagcgtaactatcagtctaacgcccagaccatcaaaacccaggaccagatcctcaacacgctggttaacttacgctaatcgctgacgggatagctcaatggatcacgcaatttacaccgcgatgggagcagccagccagacactgaatcaacaggcggtaaccgccagtaatctggccaatgcctcaacgcccggttttcgcgcgcagttgaatgctttacgcgcggtgccagtggaagggctttctctgcccacgcgcacgttggtcacggcgtcaacgccgggcgcagatatgacgcccggcaaaatggattacacctcgcgcccgctggacgtcgcgttgcagcaggatggctggctggccgtgcagaccgctgacggcagcgaagggtatacgcgtaatggcagcattcaggttgatcccaccgggcaactgacaattcaggggcatccggtgataggcgaggctgggccaattgctgtgccggaaggggcggaaatcactattgctgccgatggcacaatctcggcgctcaatccgggcgatccggcaaatacggttgcgccagtagggcgtcttaaactggtgaaagccacgggcagcgaagtgcagcgcggtgacgacggcatttttcgtttaagcgcagaaacccaggccacgcgtgggccggtactgcaggcagatccaaccttgcgtgtgatgtcgggggttctggaaggcagtaacgtcaatgccgttgcggcaatgagcgacatgattgccagcgcgcggcgttttgaaatgcagatgaaggtgatcagcagcgtcgatgataacgcaggccgtgccaaccaactgctgtcgatgagttaattgaaaggatacatgacaagtataagttgcccgatgcgcaagtttatcgggtctatgggggcaatcgcaatttatcgattttgcgagcacttgtaggccggataaggcgtttacgccgcatccggcaagaagacatatgcactttgtcactaatccactacaggacattttatgatcagttcattatggatcgccaaaacgggccttgacgcccagcaaaccaatatggacgtcattgccaacaacctggcaaacgtcagtactaacggttttaagcgtcagcgcgcggtgtttgaagatctgctttatcaaaccattcgccagccgggggcacagtcttccgaacaaaccaccttaccctccggattacaaatcggcacgggggtacgcccggtcgccactgaacgcttacacagccagggaaacctgtcgcagaccaacaacagcaaagatgtcgcgattaaagggcagggctttttccaggtgatgttgccagatggttcatcagcctatacccgtgacggctctttccaggtggatcagaacgggcagctggtgacggctggtggttttcaggtgcagccagcgatcaccattccggcgaatgcgttaagtatcaccatcggtcgtgatggcgtggtcagcgtaacccaacaaggccaggcagctccggttcaggttgggcagctcaatctcaccacctttatgaatgacaccgggctggagagcattggcgaaaacctctacaccgaaacgcaatcctctggtgcaccgaacgaaagcacgccgggcctgaacggcgcgggactgctgtatcaagggtatgttgaaacgtctaacgtcaacgtggcggaagaactggtcaatatgattcaggtgcaacgcgcttacgaaatcaacagtaaagcggtgtccaccaccgatcagatgctgcaaaaactgacgcaactctaaggcttaaccggtggcaggttcaccggtttactgatttttgaagatgatagccatgcaaaaaaacgctgcgcatacttatgccatttccagcttgttggtgctttcactaaccggctgcgcctggataccctccacgccgctggtgcagggggcgaccagtgcacaaccggttcccggtccgacgcccgtcgccaacggttctattttccagtctgctcagccgattaactatggctatcaaccgctgtttgaagatcgtcgaccacgcaatattggcgatacgctgaccatcgtgttgcaggagaacgtcagcgccagcaaaagctcctctgcgaatgccagccgtgacggtaaaactaattttggctttgatactgtgccgcgctatttgcaggggctgtttggtaacgctcgtgccgatgtcgaagcctccggtggtaacacgttcaacggaaagggcggggccaatgccagcaatacctttagcggcacgttgacggtgacggttgaccaggtactggtcaacggcaacctgcatgtggtgggtgaaaaacagattgccattaatcagggtaccgaatttattcgcttctctggcgtggttaatccacgcactatcagcggcagcaataccgtaccgtctactcaggtggcggatgcgcgcattgaatacgtaggcaatggctacattaacgaagcgcaaaatatgggctggttgcagcgtttcttccttaacctgtcgccaatgtaagtgaggctgtggtgattaaatttctctctgcattaattcttctactggtcacgacggcggctcaggctgagcgtattcgcgatctcaccagtgttcagggggtaaggcaaaactcactgattggctatggtctggtggtggggctggatggcaccggtgaccagacaacccagacgccgtttaccacacaaacgcttaataacatgctctcacagctgggaattaccgttccgacgggcaccaatatgcagctaaaaaacgtcgctgcggtaatggtgacagcgtcacttcctccgtttggacgtcaggggcaaaccatcgatgtggtggtttcttccatgggaaatgccaaaagcttgcgtggaggtacgttgttgatgacaccgcttaagggcgttgacagtcaggtgtatgcgctggcgcagggcaatattctggttggcggcgcaggagcctccgctggcggtagcagtgttcaggttaaccaactgaacggtggacggatcaccaatggtgcggttattgaacgtgaattgcccagccagtttggcgtcgggaatacccttaatttgcaacttaacgacgaagatttcagcatggcgcagcaaatcgctgacaccatcaaccgcgtgcgtggatatggcagcgccaccgcgttagatgcgcggactattcaggtgcgcgtaccgagtggcaacagttcccaggtccgcttccttgccgatattcagaatatgcaggttaatgtcaccccgcaggacgctaaagtagtgattaactcgcgcaccggttcggtggtgatgaatcgcgaagtgaccctcgacagctgcgcggtagcgcaggggaatctctcagtaacagttaatcgtcaggccaatgtcagccagccagatacaccgtttggtggtggacagactgtggttactccacaaacgcagatcgatttacgccagagcggcggttcgctgcaaagcgtacgttccagcgccagcctcaataacgtggtgcgcgcgctcaatgcgctgggcgctacgccgatggatctgatgtccatactgcaatcaatgcaaagtgcgggatgtctgcgggcaaaactggaaatcatctgatgatcagcgacagcaaactactggcaagtgcggcctgggatgcgcaatcactcaacgaactaaaggcgaaagcgggcgaagatccggcggcaaatatccgtccggtggcccgtcaggtggaagggatgttcgtgcagatgatgttgaaaagcatgcgcgacgctttaccaaaagatggcctgttcagcagcgagcacactcgcctgtataccagtatgtatgaccagcagattgcccaacagatgacggcgggcaaaggtctggggcttgcagagatgatggttaaacagatgacgccagaacaaccattgccagaggagtccacgccagcagcaccgatgaaattcccgctcgaaactgtggtgcgttatcaaaatcaggcgctttcgcagctggtgcaaaaggccgtgccacgtaactacgatgattcgctgccgggtgacagtaaagcattcctcgcgcaactctcgctgcccgcccaactggcaagccagcaaagcggtgtgccacatcatttgatcctcgctcaggcggcactggaatctggttgggggcaacggcaaatccgccgcgaaaacggcgagccgagctataacctgtttggtgtcaaagcctctggcaactggaaagggccagttactgaaatcaccacgactgaatatgaaaacggcgaagcgaagaaagtaaaagcgaagtttcgcgtctacagctcgtatctggaagccttgtcggattacgttgggctgttaacgcgtaacccgcgctacgccgccgtgacgaccgccgcgagtgcggaacagggggcgcaggccctacaggacgcgggctatgccaccgatcctcactatgcccgcaaactcaccaacatgattcagcagatgaaatcgataagcgacaaggtgagcaaaacctacagtatgaacattgataatctgttctgaataactcaagtccggcgggtcgctgccgataatactctgtaattgaaggcttataaggaacctccatgtccagcttgattaataacgccatgagcggactgaacgcggcccaggcggcgttaaatacggcaagtaataatatctccagctataacgttgccggatatacccgccaaaccactattatggcgcaggccaatagcacgttgggcgctggcggctgggttggcaatggtgtctacgtttctggtgtgcagcgtgagtatgatgcgtttattaccaaccagttacgtgcggcgcagacgcaaagtagcggtctgactgcccgctatgagcagatgtcgaaaatcgacaatatgctctccaccagtacctcttcgctggcaacacagatgcaggatttcttcaccagcctgcaaacgctggtgagtaacgcggaagacccggcagcgcgccaggcgctgattgggaaatcagaaggattggtgaatcagtttaaaaccaccgatcaatatctgcgcgaccaggacaaacaggtcaatatcgcgataggtgccagcgttgatcagatcaacaactacgctaaacaaattgccagcctgaacgatcaaatctcgcgcctgacaggcgtgggggcaggggcgtcacctaacaatctgctggatcaacgcgatcaactggtgagcgaattaaaccagattgttggtgtagaagtcagcgttcaggatggcggcacttataacatcacgatggccaatggttactcactggttcagggaagtacggcgcggcaactggcggcagttccttccagcgctgacccttctcgtacgactgtcgcttatgttgatgggacggcaggcaatattgagatcccggagaaattactgaataccgggtcgctgggcggcattctgacattccgttctcaggatctggaccagacgcgtaatacgcttggacaactggcgctggcatttgccgaggctttcaacacccaacacaaagccggatttgatgctaacggcgatgccggtgaagatttctttgctatcgataagcccgcggttctgcaaaacacgaaaaacaaaggtgacgttgcgatcggtgccacggtaactgatgcctccgcggtactggcgacagattacaaaatctcgttcgataataatcagtggcaggtcacccgccttgccagcaataccacttttacggtgacgccggatgccaacggtaaagtggcatttgatggtctggagttgacgtttacaggaacgcctgccgttaacgacagcttcacgctgaaaccagtaagtgacgccatcgtcaacatggatgtattaatcaccgacgaagcgaaaatagcgatggcgagcgaagaagatgcgggtgatagcgataaccgcaacggtcaggccctgctggatctgcaaagcaacagtaaaacggtgggcggtgcgaaatcctttaacgacgcttatgcctcgttagtgagtgatatcggtaataaaaccgcgacgttgaaaaccagtagcgccacgcaaggtaatgtggtgacgcagctttccaatcagcagcagtcgatttccggtgtcaatctcgatgaggagtacggaaatctgcaacgttttcagcagtattacctggcgaatgcgcaggttctgcagacggcaaacgcgatttttgatgcgctgattaacattcgctaaggggagataagatgcgtttcagtacacagatgatgtaccagcaaaacatgcgtggtatcaccaattctcaggcagaatggatgaagtacggcgaacagatgtcgacgggtaagcgagtcgttaacccttctgacgatcccattgctgcatcacaagccgtagttctctcccaggcacaggcgcaaaacagccagtacacgctggcgcgtactttcgccactcaaaaagtgtcactggaagagagtgtacttagccaggtcaccactgctatccagaatgctcaggaaaaaattgtctacgccagcaatggcaccttgagtgacgatgaccgggcctcgctggctacggatattcaggggcttcgtgaccagttgctgaatctggcaaacaccactgacggtaacgggcgctacatttttgccggttataaaacagagactgcgccgtttagcgaagagaaagggaaatacgtcggtggagcagaaagtattaaacaacaggtcgatgcttcgcgttcgatggtgatagggcacacgggtgacaaaattttcgacagtattaccagcaacgcggtagcggaaccagacggtagcgcttctgaaaccaatctttttgccatgctggatagtgccatcgcagccctgaaaacgccggtcgcggatagcgaagcggataaagaaaccgccgctgcggcgttagataaaaccaaccgcggactgaaaaactcgctgaacaatgtgctgactgttcgcgcggaattaggcacgcagctgaacgaactggagtcgctggattcattaggtagcgatcgcgctttagggcaaacgcagcagatgagcgatctggttgatgtggactggaatgcaactatttcatcttacatcatgcagcaaacggcattgcaggcatcgtataaagcatttaccgatatgcagggattgtcgctcttccagctcagcaaataatttcgctttaaaacatatcatgaaactgggtatgttttgtctgcctgctctgggatcgctggggcgggcatttttttgcctattttgcattgttggttagcaaggatgccattcgatgaattttaatatgttgattcaaagatgaaataaaaaagccctggcagttaccagggcttgattactttgagctaattattactcaacaggttgcggacgcgcaggagcggcagaggcatgatgtgttgccgtatgaccacctgcggcacctttaccttcgaaggcaaaagtagggcgctgccagtcactgtgacgcggtgcctccggaacatattccggtgctggagcgcgcgtcattggcgcggtagcgtggttatgctcaacggtgacctcaggttcgaccgcagctaccgtttcaacttctgctgcgacttcagcgactactggcgcggcaggttgagcaacaacttcaggttcagcaactacaacctcagcagtttcgacaacttcttcaatatctgccgtctcttcctgcggttcaaccaccggttctgcttgttctgcaacttcctgggctacggcaacatcagactcggtaatcacctgcggctgttcagttaccgcggcagcgatcacttcaggatgcgtcgtttcaaccacttccggttgcggttcggcaacctgaacgggggcttctacgacaccggccacttcttcaacaactggcgcgctaacaaccggttcgatagcggcggcgacagggacctcagtcaccatcggctgcacatgtacttcttcctgttcgcgctgctcttcaacctgtacatcttgcggacgtacaattggatagcggatccagactttgccagaggccagttccggagacgcgcacgctacggtcaacggcattggcgactgggttggataacgctcgtcacgatagcgacgacgacgctgaccacttacgcgcaggtgacgaggcgagcggcgagaacgacgcggcatgccaccgttgtcacggttatcagcattgttctcttcttgctgttctggtgcagtttgcgctacgactggcagcgggactttcaccagttctgtgcgtggagctggcgcttcctgaacaattggttcggcagcgacagtttcttcaaccaccggtgcgactaccgcttcttcggctacgctttgctcgtaacgcactttctgattgagctgacgctgtttacgacgcggctgaaccggacgtacacgttcttcctgttcggtttcctgaacagattgctcttcaacattcagcgccttcgcttcttgttgcgcctgacgtttatcatcattacggcggcggctacgttcacgacgcggcgcttgctgctcgtcggcggtacgcgctttttccgttacctcagcctgctgacggctctcacgcgtctcggcagtctgctgctgtgcctggcgacgattacgacggttttcttcgcgattatcgctgccttcagtacgttcactacgggtgtcgcggcgctcattacggtcacggcggttgttctgacgaggcttgcgacgatcctgttgacgttccggtttcgcttctgctttcggtgctggttgctcggtcggtttggtttcttcaccaccgctgaacagcgctttcagtgcgccgaagaagcggctcaacagcccaggttgtgcaggagctgctggtgttgccggtgcagctttcggtgctggagctacaacaggcgcggcaggttcagctggcgttggcgcaggcggcacatccggcatggcaaaggttgccagcgcaggttgttccggacgcttacgttcagcgaactcttcttcagacggcagcgccatcgcttcttcatgcagcttcggcagcatgtagcttaaggttggggtttcttcccctttacgcacgcgcagcacgtggtagtgcggggtttccatctgatcgtttggcacaattacacagcgcacaccgtcctgacgagtttcaatggcatttaccgcagaacgtttttcattcagcaggtaagaagcgattggcacaggaacaatggcgtgaacttcctgggtgttctctttcagcgcttcttcttcgatcagacgcagaatagagagcgacagcgattcgttgtcacgcacggtgccagtaccagaacaacgcggacaaacgtgatgactggattcacccagtgatgggctcaggcgctgacgggacatttccagcaggccaaagcgagaaatatggctgatttgaatacgcgcacggtcctgacgcaccgcttcacgcagacggttttctaccgcacgctggtggcgtactggcgtcatgtcgatgaagtcgataacaatcaggccgccgaggtcacgcaggcgcagctgacgagcaatctcatcggcagcttcgaggttagtgttaaacgcggtttcttcgatatcgccgccgcgggtcgcgcgtgcggagttgatgtcgatggccgttaacgcttcggtgctgtcgataacaatggaaccaccagacggcagacgaacttcacgctggaaggcggactcgatctgtgactcgatctggtagtggctgaacagcgggatctcgccggtgtacagtttgattttgctgctgaaatccgggcgacctaatgcagcgatatgctgacgtgccagttcgagcactttcgggttatcgataaggatttcgccgatgtcctgacgtaagtaatcgcggaatgcgcgaacgattacgttgctctcctgatgaatcaggaacggggccgggcggctttcagcggcttttttgatggcttcccagtgtttcagacggaagcttaaatcccattgcagcgcctcagcagatttgccgacgccagcggtgcgcacgataagccccatgccttccggcagttcaaggcttgccagtgcttcttttaattcggtacggtcgtcgccttcgatacggcgagaaatgccacccgcgcgcgggttgttcggcatcagaaccagatagctacccgccagactgataaaggtggttaatgccgcgcctttgttgccgcgctcttctttatcgatctgaacaatgacttcctgaccttcacgcaacacatctttaatgttgggacgaccatgagcactgtagttagcagggaaatattcgcgggcaatttcttttagtgggaggaaaccgtgacgttcagcgccgtaatcaacaaaagcagcttccagactcggttcaatgcgggtgattttacctttgtagatgtttgcctttttctgctcgtgccctggactttcgatatccaggtcatacagacgctgcccatctacaagggcaacgcgcaactcttcctgctgagttgcgttgattaacattcttttcatcgtaacttactcattattcttacattgacgactaagctgcgggcaaagtaacgcctttccgggtgtgaaccgatggcctcgtgtctagtcgcgtcgccaacctcacggttatcgtcagctcaaagaggcgcagagtgtcggttgcccgtttttcatgcggaaaaacagcgcaattatcaaagaaacagactgggtattactctccagaaatatttccatctaccggtaaggactgcaacccgcagcccgctaactgcctgaaagatcaatacgtcttacgccattgctgcgtggatgatcggtcgggcaaaatgggttattccgtaaaatttcttgttttaacaaggatggacacggaaacggcctcattattccactgcaagccttgttatagcaagatgacttttaccatttatcacccgcttactcacagttttttcacttcttgctggtgattggtttaataaccatcaataaagtgatcacgcagtgaagtaataaggtgcaaaagtaaatataagcatagaaaaatgagtggcgcgaatcctgttggctaattagaatcgccaaccatgaaaacagagactccatccgtaaaaattgttgctatcaccgctgacgaagcggggcaacgtatcgataactttttgcgtacccaattgaaaggcgtaccaaaaagtatgatttaccgtattttgcgtaaaggcgaagtgcgggtgaacaaaaaacgtattaagcctgaatataaactcgaagcgggtgatgaggtgcgtattccaccggttcgcgttgctgagcgggaagaagaggcggtttcgccacatctgcaaaaggtggcggcgctggcggacgtcatcttatatgaagatgatcacatcctggtgctgaataaaccttccggtacggcggtacatggcggcagtggtttaagcttcggcgttattgaaggtttgcgggcgttgcgcccggaagcgcggttccttgaactggttcatcgtcttgaccgggacacctcaggtgttttgctggtagcgaaaaaacgctcggcgttgcgttctctgcatgagcaattacgtgaaaaagggatgcaaaaagattacttggcgctggtgcgcggtcagtggcagtcgcatgtgaagagcgttcaagcaccgttactgaaaaatattctgcaaagcggcgaacgtatcgtgcgtgtgagtcaggaaggcaaaccgtcggaaacacgctttaaagtggaagaacgctatgcatttgccaccctggtgcgttgtagcccggtaacagggcgtactcaccagatccgtgtgcatacacaatatgcgggtcatccgattgcctttgacgatcgctacggtgaccgtgaatttgacaggcagctcactgaagcaggcacgggattaaatcgcctgttcctgcacgctgcagcgttgaagtttactcatccggggaccggtgaggtgatgcgtatcgaagctccgatggatgaaggtttgaagcgttgtttgcaaaagctgcgtaacgcgcgctaatacaagcatataaacctgataatgggcggttggcctgataaggcgtttacgccgcatcaggccgccagcaccgattgccggatgcgacgtaaccacatccggcgcaaaaaactatcccatcagcgggtttttcccttcccgacgtaacatctgacacagcgcgattagcggtaaaccaaccagcgtgttaggatcacgcccctctaaacgctcaaacagcgtaatgccaaatccttcactcttaaagctacccgcgcagtgcaggggatgctctttacgcacgtaattatcaatctccgcctcgctcaggtgacggaaatggacgtcaaaaggctccacttctgtttgcagatgcccattcgccgaattaaacaacgccagtccagtatagaaggtgacgatattgccgctggctttgcgtaattgcagacgggcattttcttccgttaacggtttaccggtgatttcgccatcaagaacacatacctggtctgaaccaataattaaatgatccggataacgtgacgccagagattgcgctttttcttgtgccagtcgaagcaccaactgtcgcggtgattcgtcgctgcgtggggtttcgtcgacctctggtgctgcacattcaaaagagatttgcagtttttccagaagagcgcgacgccatggcgaggtggaggctaaaataagtttaggcatatttttttccatcagatatagcgtattgatgatagccattttaaactatgcgcttcgttttgcaggttgatgtttgttatcagcactgaacgaaaataaagcagtaacccgcaatgtgtgcgaattattggcaaaaggcaaccacaggctgcctttttctttgactctatgacgttacaaagttaatatgcgcgccctatgcaaaaggtaaaattacccctgactctcgatccggttcgtacggctcaaaaacgccttgattaccagggtatctatacccctgatcaggttgagcgcgtcgccgaatccgtagtcagtgtggacagtgatgtggaatgctccatgtcgttcgctatcgataaccaacgtctcgcagtgttaaacggcgatgcgaaggtgacggtaacgctcgagtgtcagcgttgcgggaagccgtttactcatcaggtctacacaacgtattgttttagtcctgtgcgttcagacgaacaggctgaagcactgccggaagcgtatgaaccgattgaggttaacgaattcggtgaaatcgatctgcttgcaatggttgaagatgaaatcatcctcgccttgccggtagttccggtgcatgattctgaacactgtgaagtgtccgaagcggacatggtctttggtgaactgcctgaagaagcgcaaaagccaaacccatttgccgtattagccagcttaaagcgtaagtaattggtgctccccgttggatcggggataaaccgtaattgaggagtaaggtccatggccgtacaacagaataaaccaacccgttccaaacgtggcatgcgtcgttcccatgacgcgctgaccgcagtcaccagcctgtctgtagacaaaacttctggtgaaaaacacctgcgtcaccacatcactgccgacggttactaccgcggccgcaaggtcatcgctaagtaatcacgcatctgcgtgatgaagcttagtgaggattttccccaggcaactggggaaagaccaaaccgggcggcgacgataccttgacacgtctaaccctggcgttagatgtcatgggaggggattttggcccttccgtgacagtgcctgcagcattgcaggcactgaattctaattcgcaactcactcttcttttagtcggcaatcccgacgccatcacgccattacttgctaaagctgactttgaacaacgttcgcgtctgcagattattcctgcgcagtcagttatcgccagtgatgcccggccttcgcaagctatccgcgccagtcgtgggagttcaatgcgcgtggccctggagctggtgaaagaaggtcgagcgcaagcctgtgtcagtgccggtaataccggggcgctgatggggctggcaaaattattactcaagcccctggaggggattgagcgtccggcgctggtgacggtattaccacatcagcaaaagggcaaaacggtggtccttgacttaggggccaacgtcgattgtgacagcacaatgctggtgcaatttgccattatgggctcagttctggctgaagaggtggtggaaattcccaatcctcgcgtggcgttgctcaatattggtgaagaagaagtaaagggtctcgacagtattcgggatgcctcagcggtgcttaaaacaatcccttctatcaattatatcggctatcttgaagccaatgagttgttaactggcaagacagatgtgctggtttgtgacggctttacaggaaatgtcacattaaagacgatggaaggtgttgtcaggatgttcctttctctgctgaaatctcagggtgaagggaaaaaacggtcgtggtggctactgttattaaagcgttggctacaaaagagcctgacgaggcgattcagtcacctcaaccccgaccagtataacggcgcctgtctgttaggattgcgcggcacggtgataaaaagtcatggtgcagccaatcagcgagcttttgcggtcgcgattgaacaggcagtgcaggcggtgcagcgacaagttcctcagcgaattgccgctcgcctggaatctgtatacccagctggttttgagctgctggacggtggcaaaagcggaactctgcggtagcaggacgctgccagcgaactcgcagtttgcaagtgacggtatataaccgaaaagtgactgagcgtacatgtatacgaagattattggtactggcagctatctgcccgaacaagtgcggacaaacgccgatttggaaaaaatggtggacacctctgacgagtggattgtcactcgtaccggtatccgcgaacgccacattgccgcgccaaacgaaaccgtttcaaccatgggctttgaagcggcgacacgcgcaattgagatggcgggcattgagaaagaccagattggcctgatcgttgtggcaacgacttctgctacgcacgctttcccgagcgcagcttgtcagattcaaagcatgttgggcattaaaggttgcccggcatttgacgttgcagcagcctgcgcaggtttcacctatgcattaagcgtagccgatcaatacgtgaaatctggggcggtgaagtatgctctggtcgtcggttccgatgtactggcgcgcacctgcgatccaaccgatcgtgggactattattatttttggcgatggcgcgggcgctgcggtgctggctgcctctgaagagccgggaatcatttccacccatctgcatgccgacggtagttatggtgaattgctgacgctgccaaacgccgaccgcgtgaatccagagaattcaattcatctgacgatggcgggcaacgaagtcttcaaggttgcggtaacggaactggcgcacatcgttgatgagacgctggcggcgaataatcttgaccgttctcaactggactggctggttccgcatcaggctaacctgcgtattatcagtgcaacggcgaaaaaactcggtatgtctatggataatgtcgtggtgacgctggatcgccacggtaatacctctgcggcctctgtcccgtgcgcgctggatgaagctgtacgcgacgggcgcattaagccggggcagttggttctgcttgaagcctttggcggtggattcacctggggctccgcgctggttcgtttctaggataaggattaaaacatgacgcaatttgcatttgtgttccctggacagggttctcaaaccgttggaatgctggctgatatggcggcgagctatccaattgtcgaagaaacgtttgctgaagcttctgcggcgctgggctacgacctgtgggcgctgacccagcaggggccagctgaagaactgaataaaacctggcaaactcagcctgcgctgttgactgcatctgttgcgctgtatcgcgtatggcagcagcagggcggtaaagcaccggcaatgatggccggtcacagcctgggggaatactccgcgctggtttgcgctggtgtgattgatttcgctgatgcggtgcgtctggttgagatgcgcggcaagttcatgcaagaagccgtaccggaaggcacgggcgctatggcggcaatcatcggtctggatgatgcgtctattgcgaaagcgtgtgaagaagctgcagaaggtcaggtcgtttctccggtaaactttaactctccgggacaggtggttattgccggtcataaagaagcggttgagcgtgctggcgctgcctgtaaagcggcgggcgcaaaacgcgcgctgccgttaccagtgagcgtaccgtctcactgtgcgctgatgaaaccagcagccgacaaactggcagtagaattagcgaaaatcacctttaacgcaccaacagttcctgttgtgaataacgttgatgtgaaatgcgaaaccaatggtgatgccatccgtgacgcactggtacgtcagttgtataacccggttcagtggacgaagtctgttgagtacatggcagcgcaaggcgtagaacatctctatgaagtcggcccgggcaaagtgcttactggcctgacgaaacgcattgtcgacaccctgaccgcctcggcgctgaacgaaccttcagcgatggcagcggcgctcgagctttaaaagaggaaaatcatgaattttgaaggaaaaatcgcactggtaaccggtgcaagccgcggaattggccgcgcaattgctgaaacgctcgcagcccgtggcgcgaaagttattggcactgcgaccagtgaaaatggcgctcaggcgatcagtgattatttaggtgccaacggcaaaggtctgatgttgaatgtgaccgacccggcatctatcgaatctgttctggaaaaaattcgcgcagaatttggtgaagtggatatcctggtcaataatgccggtatcactcgtgataacctgttaatgcgaatgaaagatgaagagtggaacgatattatcgaaaccaacctttcatctgttttccgtctgtcaaaagcggtaatgcgcgctatgatgaaaaagcgtcatggtcgtattatcactatcggttctgtggttggtaccatgggaaatggcggtcaggccaactacgctgcggcgaaagcgggcttgatcggcttcagtaaatcactggcgcgcgaagttgcgtcacgcggtattactgtaaacgttgttgctccgggctttattgaaacggacatgacacgtgcgctgagcgatgaccagcgtgcgggtatcctggcgcaggttcctgcgggtcgcctcggcggcgcacaggaaatcgccaacgcggttgcattcctggcatccgacgaagcagcttacatcacgggtgaaactttgcatgtgaacggcgggatgtacatggtctgaccgcgatttgcacaaaatgctcatgttgcgcgcagtctgcgtggttatgagtaataattagtgcaaaatgatttgcgttattggggggtaaggcctcaaaataacgtaaaatcgtggtaagacctgccgggatttagttgcaaatttttcaacattttatacactacgaaaaccatcgcgaaagcgagttttgataggaaatttaagagtatgagcactatcgaagaacgcgttaagaaaattatcggcgaacagctgggcgttaagcaggaagaagttaccaacaatgcttctttcgttgaagacctgggcgcggattctcttgacaccgttgagctggtaatggctctggaagaagagtttgatactgagattccggacgaagaagctgagaaaatcaccaccgttcaggctgccattgattacatcaacggccaccaggcgtaagtgaacatctccaggcggtcgttcgaccgcctgagttttatctttttgtcccactagaatcattttttccctccctggaggacaaacgtgtctaagcgtcgtgtagttgtgaccggactgggcatgttgtctcctgtcggcaataccgtagagtctacctggaaagctctgcttgccggtcagagtggcatcagcctaatcgaccatttcgatactagcgcctatgcaacgaaatttgctggcttagtaaaggattttaactgtgaggacattatctcgcgcaaagaacagcgcaagatggatgccttcattcaatatggaattgtcgctggcgttcaggccatgcaggattctggccttgaaataacggaagagaacgcaacccgcattggtgccgcaattggctccgggattggcggcctcggactgatcgaagaaaaccacacatctctgatgaacggtggtccacgtaagatcagcccattcttcgttccgtcaacgattgtgaacatggtggcaggtcatctgactatcatgtatggcctgcgtggcccgagcatctctatcgcgactgcctgtacttccggcgtgcacaacattggccatgctgcgcgtattatcgcgtatggcgatgctgacgtgatggttgcaggtggcgcagagaaagccagtacgccgctgggcgttggtggttttggcgcggcacgtgcattatctacccgcaatgataacccgcaagcggcgagccgcccgtgggataaagagcgtgatggtttcgtactgggcgatggtgccggtatgctggtacttgaagagtacgaacacgcgaaaaaacgcggtgcgaaaatttacgctgaactcgtcggctttggtatgagcagcgatgcttatcatatgacgtcaccgccagaaaatggcgcaggcgcagctctggcgatggcaaatgctctgcgtgatgcaggcattgaagcgagtcagattggctacgttaacgcgcacggtacttctacgccggctggcgataaagctgaagcgcaggcggtgaaaaccatcttcggtgaagctgcaagccgtgtgttggtaagctccacgaaatctatgaccggtcacctgttaggtgcggcgggtgcagtagaatctatctactccatcctggcgctgcgcgatcaggctgttccgccaaccatcaacctggataacccggatgaaggttgcgatctggatttcgtaccgcacgaagcgcgtcaggttagcggaatggaatacactctgtgtaactccttcggcttcggtggcactaatggttctttgatctttaaaaagatctaagttgtcattttccacccttataaaaggtccgcttgcgggccttttttcttagcttttattccgacttgttccgtagtgaacatgctgccacactaacaattctctgataaggagccggtatgttcttaattaacggtcataagcaggaatcgctggcagtaagcgatcgggcaacgcagtttggtgatggttgttttaccaccgccagagttatcgacggtaaagtcagtttgttatcggcgcatatccagcgactacaggatgcttgtcagcggttgatgatttcctgtgacttctggcctcagcttgaacaagagatgaaaacgctggcagcagaacagcaaaatggtgtgctgaaagtcgtgatcagtcgcggtagtggcgggcgagggtacagcacattgaacagcggaccggcaacgcggattctctccgttacggcttatcctgcacattacgaccgtttgcgtaacgaggggattacgttggcgctaagcccggtgcggctggggcgcaatcctcatcttgcaggtattaaacatctcaatcgtcttgagcaagtattgattcgctctcatcttgagcagacaaacgctgatgaggcgctggtccttgacagcgaagggtgggttacggaatgctgtgcggctaatttgttctggcggaagggcaacgtagtttatacgccgcgactggatcaggcaggtgttaacggcattatgcgacaattctgtatccgtttgctggcacaatcctcttatcagcttgtcgaagtgcaagcctctctggaagagtcgttgcaggcagatgagatggttatttgtaatgcgttaatgccagtgatgcccgtatgtgcctgtggcgatgtctccttttcgtcagcaacgttatatgaatatttagccccactttgtgagcgcccgaattagtcatgaaaaaagtgttattgataatcttgttattgctggtggtactgggtatcgccgctggtgtgggcgtctggaaggttcgccatcttgccgacagcaaattgcttatcaaagaagagacgatatttaccctgaagccagggaccggacgtctggcgctcggtgaacagctttatgccgataagatcatcaatcgtccacgggtttttcaatggctgctgcgtatcgaaccggatctttctcactttaaagccgggacttaccgctttacaccgcagatgaccgtgcgcgagatgctgaaattgctggaaagcggtaaagaagcacagttccctctgcgactggtagaagggatgcgtctgagcgattacctcaagcaattgcgtgaggccccgtatatcaagcatacgctgagcgatgataagtacgccaccgtagcgcaggcacttgaactggaaaacccggagtggattgaaggttggttctggccagacacctggatgtataccgccaataccaccgatgtcgcgttactcaagcgagcgcacaagaaaatggtgaaagcggtcgatagcgcctgggaagggcgtgcggacggtctgccttataaagataaaaaccagttggtgacgatggcatcaattatcgaaaaagaaaccgccgttgccagtgaacgcgataaggttgcctcagtatttatcaaccgtttacgcattggtatgcgcctgcagaccgacccgaccgtgatttacgggatgggagagcgttataatggcaaactttctcgtgcagacctggaaacgccgacagcgtataacacctataccattaccggtctgccgccaggtgcgatagcgacgccgggggcggattcgctgaaggctgctgcgcatccggcaaaaacgccgtatctctattttgtggccgatggtaaaggtggtcacacgtttaataccaatcttgccagtcataacaagtctgtgcaggattatctgaaagtgcttaaggaaaaaaatgcgcagtaagtatatcgtcattgaggggctggaaggcgcaggcaaaactaccgcgcgtaatgtggtggttgagacgctcgagcaactgggtatccgcgacatggttttcactcgggaacctggcggtacgcaacttgccgaaaagttaagaagcctggtgctggatatcaaatcggtaggcgatgaagtcattaccgataaagccgaagttctgatgttttatgccgcgcgcgttcaactggtagaaacggtcatcaaaccagctctggctaacggcacctgggtgattggcgatcgccacgatctctccactcaggcgtatcagggcggcggacgtggtattgaccaacatatgctggcaacactgcgtgatgctgttctcggggattttcgccccgacttaacgctctatctcgatgttaccccggaagttggcttaaaacgcgcgcgtgcgcgcggcgagctggatcgtattgagcaagaatctttcgatttctttaatcgcacccgcgcccgctatctggaactggcagcacaagataaaagcattcataccattgatgccacccagccgctggaggccgtgatggatgcaatccgcactaccgtgacccactgggtgaaggagttggacgcatgagatggtatccatggttacgacctgatttcgaaaaactggtagccagctatcaggccggaagaggtcaccatgcgctactcattcaggcgttaccgggcatgggcgatgatgctttaatctacgccctgagccgttatttactctgccaacaaccgcagggccacaaaagttgcggtcactgtcgtggatgtcagttgatgcaggctggcacgcatcccgattactacaccctggctcccgaaaaaggaaaaaatacgctgggcgttgatgcggtacgtgaggtcaccgaaaagctgaatgagcacgcacgcttaggtggtgcgaaagtcgtttgggtaaccgatgctgccttactaaccgacgccgcggctaacgcattgctgaaaacgcttgaagagccaccagcagaaacctggtttttcctggctacccgcgagcctgaacgtttactggcaacattacgtagtcgttgtcggttacattaccttgcgccgccgccggaacagtacgccgtgacctggctttcacgcgaagtgacaatgtcacaggatgcattacttgccgcattgcgcttaagcgccggttcgcctggcgcggcactggcgttgtttcagggagataactggcaggctcgtgaaacattgtgtcaggcgttggcatatagcgtgccatcgggcgactggtattcgctgctagcggcccttaatcatgaacaagctccggcgcgtttacactggctggcaacgttgctgatggatgcgctaaaacgccatcatggtgctgcgcaggtgaccaatgttgatgtgccgggcctggtcgccgaactggcaaaccatctttctccctcgcgcctgcaggctatactgggggatgtttgccacattcgtgaacagttaatgtctgttacaggcatcaaccgcgagcttctcatcaccgatcttttactgcgtattgagcattacctgcaaccgggcgttgtgctaccggttcctcatctttaagagagacatcatgtttttagtcgactcacactgccatctcgatggtctggattatgaatctttgcataaggacgtggatgacgttctggcgaaagccgccgcacgcgatgtgaaattttgtctggcagtcgccacaacattaccgggttatttacatatgcgggatctggtaggcgaacgtgacaacgtcgtattttcttgtggcgtgcatccactcaaccagaatgatccctacgatgtagaagatttacgccgtctggcggcagaagagggtgttgtagcgctgggtgaaaccgggctggattattattacacgccggaaactaaagtacgtcagcaagagtccttcatccatcatatccagattggtcgtgaactgaacaagccggttatcgtccatacccgtgacgcccgtgccgatacgctggcaattctgcgcgaagaaaaagtgacggattgcggtggcgtactacactgttttacagaggacagagaaacggcgggtaaattactggatctcggattttacatctccttttccggcattgtgaccttccgtaatgcggagcaactgcgcgatgctgcgcgttatgtccccctggatcggttactggtggaaactgactcaccttaccttgcgccggtaccgcatcgaggaaaagagaatcaacctgcgatggttcgtgacgttgcagaatacatggctgtgttgaaaggtgttgccgttgaagaactggcgcaggtaaccaccgataacttcgcccgtctgtttcacatcgacgcttcccgccttcaatccatccgttgaatgagtttttttaaagctcgtaattaatggctaaaacgagtaaagttcaccgccgaaaattgggcggtgaataaccacgtttgaaatattgtgacatatgttttgtcaaaatgtgcaacttctccaatgatctgaagttgaaacgtgatagccgtcaaacaaattggcactgaattattttactctgtgtaataaataaagggcgcttagatgccctgtacacggcgaggctctccccccttgccacgcgtgagaacgtaaaaaaagcacccatactcaggagcactctcaattatgtttaagaatgcatttgctaacctgcaaaaggtcggtaaatcgctgatgctgccggtatccgtactgcctatcgcaggtattctgctgggcgtcggttccgcgaatttcagctggctgcccgccgttgtatcgcatgttatggcagaagcaggcggttccgtctttgcaaacatgccactgatttttgcgatcggtgtcgccctcggctttaccaataacgatggcgtatccgcgctggccgcagttgttgcctatggcatcatggttaaaaccatggccgtggttgcgccactggtactgcatttacctgctgaagaaatcgcctctaaacacctagcggatactggcgtactcggagggattatctccggtgcgatcgcagcgtacatgtttaaccgtttctaccgtattaagctgcctgagtatcttggcttctttgccggtaaacgctttgtgccgatcatttctggcctggctgccatctttactggcgttgtgctgtccttcatttggccgccgattggttctgcaatccagaccttctctcagtgggctgcttaccagaacccggtagttgcgtttggcatttacggtttcatcgaacgttgcctggtaccgtttggtctgcaccacatctggaacgtacctttccagatgcagattggtgaatacaccaacgcagcaggtcaggttttccacggcgacattccgcgttatatggcgggtgacccgactgcgggtaaactgtctggtggcttcctgttcaaaatgtacggtctgccagctgccgcaattgctatctggcactctgctaaaccagaaaaccgcgcgaaagtgggcggtattatgatctccgcggcgctgacctcgttcctgaccggtatcaccgagccgatcgagttctccttcatgttcgttgcgccgatcctgtacatcatccacgcgattctggcaggcctggcattcccaatctgtattcttctggggatgcgtgacggtacgtcgttctcgcacggtctgatcgacttcatcgttctgtctggtaacagcagcaaactgtggctgttcccgatcgtcggtatcggttatgcgattgtttactacaccatcttccgcgtgctgattaaagcactggatctgaaaacgccgggtcgtgaagacgcgactgaagatgcaaaagcgacaggtaccagcgaaatggcaccggctctggttgctgcatttggtggtaaagaaaacattactaacctcgacgcatgtattacccgtctgcgcgtcagcgttgctgatgtgtctaaagtggatcaggccggcctgaagaaactgggcgcagcgggcgtagtggttgctggttctggtgttcaggcgattttcggtactaaatccgataacctgaaaaccgagatggatgagtacatccgtaaccactaatccgtaagacgttggggagactaaggcagccagatggctgccttttttacaggtgttattcagaattgatacgtgccggtaatgctgaaattacgcggtgtgccgtagacgatagaaccttccacgttggtatcgtaggttttgtcgaacaggttattgacgttcccctgtaacgagaagtttttcgtcacctggtagcgggtgaagagatccaccagcgcgtagctaccttgctcggcgcggaaggtgccatacggcgtcacggtgtcggtatacacgcgattttgccagttaacaccaccgccgaccgtcaactctggcatgacaggcaaccgatagctggtgaacattttaaccgtggtgcgtggcagattaggattaacggcgtttccttcgttatcctctgcaatatagcgcgttgcgccaaatgtcagctgccagttgtcggtaattgcgccgttgagttcaaattccacccctttactgactgtcccatccaccgctttataggcggtttcgccgttgctgccggggataggtgtaccggtggactgagcgacattatcctgctcaatacggaagatggctaacgtggtggtcagacggctattcatccagtccgatttcagacccagctcgtagttgttaccggtgattggagccagatatttgcctgaactgtcacgatcattttgcggctggaaaatagaggtatagctggcgtaggtcgaccagttgtcattgatgtcaaacaccagaccagcgtaaggcgtggtgtggtttttctccatgctgtaagtcagcgtatcaacccgccagttggtataacgtgcgccgaggatcagatgcagcggatcggcaagggtgacacgagtggcagcatataacgatttcatatgtgtggtatcgtcctgcgccaggctctgtggtgaccagtcggtttgtgggaaattgccattaaagttgtagaaactgccaatttcatccgggaagatgttggcccatgaactgaagtaacgattgttttgtttgctgtaactgccaccaaacattagattgtgctgacgaccaaacaattcataactaccgtcagcgaacaaatccagcgcatcaactttacgtttgccactgttccaaccggtgccgccgacataatcaaagccaggtccataattactgtatggcccaaccagcataccatccgctttgtttacataggcatcgacatacatcattttgctgtcaaattcgacttcagagtgggtggcattcagtgtcgcttgccaggtatcagcaaactgctgcttcagggtcataaagaccttgttgatctctttatcattgtacgcccagtcaggtgcggtactgcgtgcgcgatcgtaactgttgctgctgccatcagtattccagcgcggtaaaccgccccaggtagggctattaacatcaatgcgctgatattcgtaaccggctgaaagcgtcgtaagatcgcctaaatcagcatcgacaatgcccgagaagaaggtcttttcactgttgtagcggtccagccatgagtcgttattctggtagccgccgacaattcgcgcgcggattttaccgtcttcggtgagtgggctttgtaaatccgccacataccgttctttgttccagctaccgtattccgccgagacatcgcctttaaattcacgactggtcgcgtgttttcgaaccatattaattgccgcagatggattacccgtcccggtcatgagtcctgtcgcgccacgcactacttctacgcgttcaaagagtgccatatcagaaagtgcgtcgcccagattccagcgcgattcaaaataggtggggataccatcaaccatatagttatcgatctggaatccgcgggaataataaagagcacgatcggaatccgcctgacttttgctgatccccagcgtgttttccatcacttcgcccagcgtttgtaactgctgatcttccatccgctgctggctaacaatagtgaccgactgaggaatatcacgttgagtcatctgcattttggtacccgcagaggtagacgttacgctgtaatcattttcgccatcatctggagctgtggctgaaccctcaacaatcaccgtttcttcagtggctggtgcagcaaaagcggcagaaggtaatagtgccagtgctatgcaaccggcaagtagtgacggtttggtgatggcttgatattgattatccctgttaaattgtgttgaaagcatttgaaatctcttggtttatgttgtcgtcaggctcatgccggaggagggtgatgagcgattatatttagtgtgcgaataattttgtttgtaaatgcaaatgagaaatatacgcattcatatttgtcatgtaaaccaaacagagaatgtcttttcagcgcattcgcaggcagaaatgggaataatggcgatatatacggcagcaaaacgattttttgcttaagaaatcgtgagttaaggttgaaagagcaggtttaactcgaccatactctatactcgcagtgtggcgcggcgtagcatggcgcaacgcatggctatttgaaaaaggaaaatgtcgtggcagaagaaactatattcagcaaaattattcgtcgtgagatcccctccgatatcgtctaccaggatgatctggtaacggcgtttcgcgatatttcgccgcaagcgccaacgcatattctgatcattccgaatatcctcattccgactgtgaacgacgtctcagctgagcatgagcaggcgctgggacgcatgatcaccgtagcggcaaaaattgctgagcaagaaggtattgccgaagatggctatcgtctgatcatgaataccaaccgccatggcggacaagaggtttaccacatccatatgcacttgttgggtggccgtccgctgggaccaatgctggcgcataaaggtctgtaacgatgagaaaaggatgctttgggctggtgtctctggtgttgttactgctggtgggctgtcgttcacatccggaaattccggtgaatgatgagcaatcgctggtgatggagtcatctttattggctgcgggcatcagtgcagaaaagcccttcctttcgacgtctgatattcaaccttcagcatcctcaacgctttataacgaaaggcaagaacccgttaccgttcattatcgtttttactggtatgacgccagagggctggagatgcatcctctggaaaggccacgcagcgttaccattcccgcacattcggcggtaacgctgtacggcagcgccaattttctgggggcgcacaaagtcagactttatctatatttgtaaggggtgaatcttgatgacaaaaatgagtcgctacgccttgattaccgcgctggcgatgtttctcgccgggtgtgtggggcaacgtgaacctgcaccggtagaagaagtgaaaccagcgccggaacaaccagccgagccacaacagcctgtccccacagtgccctcggtgccgacgatcccgcagcagccaggcccaattgagcacgaagatcaaactgcaccgcctgcgccgcatattcgccattatgactggaatggcgcaatgcagccgatggtcagtaagatgcttggggctgacggggtgactgcgggtagcgtcctgctggttgatagcgttaacaaccgtactaacggttcgctgaatgccgcagaagcgaccgaaacgctgcgaaatgcgctggctaataacgggaaatttaccctggtttccgcccagcaactgtcgatggcgaagcaacagttaggtttgtcgccgcaggacagtttaggcacccgtagtaaagccataggcattgcccgcaatgtcggcgctcattacgtgctgtactccagcgcctctggcaacgttaacgctccgaccctacaaatgcagctgatgctggtgcagacgggcgaaattatctggtcaggtaaaggtgccgtttcgcagcaataatcccatcacgcgcgacgaattgctgtcgcgctttttcccgcagtatcatcccgtcacgacgtttaatagtgggcttagtggcgggagttttctcattgaacatcagggccagcgttttgttgtgcgtcagccgcacgatcctgatgcgccgcagtccgcgttcttgcgccagtatcgggctttatcacaactacccgcatgcattgcaccgaagccgcatttatatctccgtgactggatggtagtcgactatctgcccggcgcggtaaaaacgtatttgccggataccaacgaactggcaggcttgctgtattatctacatcaacaaccacgttttggctggcgaataacgctgttgccgttactggaactgtactggcagcaaagcgatccggcgcggcggacagtgggttggctgcgaatgttaaaacgtctgcgcaaagcgcgggaaccacggcctttacgcttaagtccattgcatatggatgtccacgccggaaatttagtgcatagcgcgtcagggttaaaactcatcgactgggagtatgccggagatggtgatatcgcgctggaactggcggcggtgtgggtggaaaatactgaacagcaccggcaattggtcaatgactatgccactcgcgcgaagatttatccggcgcaattatggcgtcaggtcaggcgatggtttccctggctgctgatgctcaaagcagggtggtttgagtaccgctggcgacaaaccggcgatcaacaatttatcaggctggccgatgacacctggcggcagctattaataaaacaataaggagagcagtgtgggtccagtaatgttggatgtcgaaggttacgaactggacgcggaagagcgtgaaatactggcgcatccgctggtgggagggctgattctctttacgcgtaactatcatgatcctgcccagttacgtgaactggtgcgccagatccgcgcagcttcgcgcaatcgtctggtggtggcggttgatcaggaaggtggacgcgtgcagcgttttcgtgaaggttttacccgcttgccagcggcgcaatcattcgctgcgctgtcaggaatggaagagggtggcaaactggcgcaggaggcaggttggttgatggccagcgaaatgatcgctatggatattgatatcagctttgcgcctgtgctggatgtcgggcatatcagcgcggcgattggcgagcgttcttatcatgccgatccacaaaaagccctggcaattgccagccggtttattgatggtatgcatgaagccggaatgaaaacgaccgggaaacacttcccaggacacggtgcagtaacggcagactcacacaaagaaacaccgtgcgatccacgtccacaagcggagattcgcgctaaagatatgtcggtcttcagttccttaatccgcggaaataaactcgacgccattatgcctgcgcatgtgatctacagtgatgttgatccgcgtccggcgagcggttctccctactggctgaaaaccgttttgcgtcaggaactgggttttgacggcgtgattttctctgacgatttatcgatggaaggtgccgcgattatgggcagttatgccgaacgcgggcaggcttcactggatgcgggttgcgatatgatcctggtctgcaataatcgtaaaggggccgtcagcgtgttagataatctgtcaccgatcaaggcagaacgtgttacacgtttgtatcataaaggttcattttcgcgacaggaactgatggactcggctcgctggaaagcgatcagcacccgtctgaatcagttacatgaacgctggcaggaagagaaagcaggtcactaaccctggcttatgtgaggaagcgatgattatctatttacacggttttgactctaacagtccgggtaaccacgagaaagtcttacaattgcagtttattgacccggatgtacgcttgataagctacagtacgcggcatccgaaacatgatatgcagcatctgcttaaagaagtggacaaaatgttgcaactgaacgttgacgagcgtccgctaatttgcggcgttggcttgggcggatactgggcggaacggattggttttctttgcgacatccgccaggtgatcttcaaccctaatttgttcccttatgagaacatggaaggcaagattgatcgcccggaagagtatgccgatattgccactaagtgtgtgaccaacttccgtgagaagaatcgcgatcgttgcctggtgattttgtcgcgtaatgatgaagcgcttaacagccagcggacatctgaagagttgcatcattattacgagattgtctgggacgaagagcagacgcacaaattcaagaatatctccccgcatttacagcgcattaaagcgttcaaaaccctcgggtaaatgccctcgtcgcatcaggtaaccttgccggtacctgatgcgctccgaattctgtgggtcggataaggcgtccacgccgcatccgacagtcgagcatcaatgcctgatgcgcttcttatcaggcctaccgaacgccctgcatacacccctcactctatatcactctcacaaattcgctcaaataataaacaataaactctgttttttgatctcacccggtaaagtcgcctatcttttcagcaacaaaacttgattaacatcaattttggtatgaccaatgcacaattcatgttattctcaatagcgaagaacattttcattgctgtaacctgttgttaattaagagctatgttaataaccattaattaacaattggttaataaatttaagggggtcacgttgactacgccattgaaaaagattgtgattgtcggcggcggtgctggtgggctggaaatggcaacacagctggggcataagctgggacgcaagaaaaaagccaaaattacgctggtcgatcgtaaccacagccacctgtggaaaccgctgctgcacgaagtggcgactggctcgcttgatgaaggcgtcgatgcgttgagctatctggcccatgcgcgcaatcatggtttccagttccagctgggttccgtcattgatattgatcgtgaagcgaaaacaatcactattgcagaactgcgcgacgagaaaggtgaactgctggttccggaacgtaaaatcgcctatgacaccctggtaatggcgctgggtagcacctctaacgatttcaatacgccaggtgtcaaagagaactgcattttcctcgataacccgcaccaggcgcgtcgcttccaccaggagatgctgaatttgttcctgaaatactccgccaacctgggcgcgaatggcaaagtgaacattgcgattgtcggcggcggcgcgacgggtgtagaactctccgctgaattgcacaacgcggtcaagcaactgcacagctacggttacaaaggcctgaccaacgaagccctgaacgtaacgctggtagaagcgggagaacgtattttgcctgcgttaccgccacgtatctctgctgcggcccacaacgagctaacgaaacttggcgttcgcgtgctgacgcaaaccatggtcaccagtgctgatgaaggcggcctgcacactaaagatggcgaatatattgaggctgatctgatggtatgggcagccgggatcaaagcgccagacttcctgaaagatatcggtggtcttgaaactaaccgtatcaaccagctggtggtggaaccgacgctgcaaaccacccgcgatccagacatttacgctattggcgactgcgcgtcatgcccgcgtccggaagggggctttgttccgccgcgtgctcaggctgcacaccagatggcgacttgcgcaatgaacaacattctggcgcagatgaacggtaagccgctgaaaaattatcagtataaagatcatggttcgctggtatcgctgtcgaacttctccaccgtcggtagcctgatgggtaacctgacgcgcggctcaatgatgattgaaggacgaattgcgcgctttgtatatatctcgctataccgaatgcatcagattgcgctgcatggttactttaaaaccggattaatgatgctggtggggagtattaaccgcgttatccgtccgcgtttgaagttgcattaatcgacgtacactggcggatgtggcataaacgcctcatccgcccttgaggaacagcgcgatcggcagccgcgttgtatcaggcatcctttcagactcctccgaatccttaagtatttccagccattcccgcgcttttcatcttctgtctgatagctgcttttctccttcgcttgcatgattggcataactgcaaagaaggaggtgttcccgtgaataaatcaatgttggcgggtatcgggattggtgtcgcagctgcgctgggcgtagcggcagtggccagtctgaacgtgtttgaacggggcccgcaatacgctcaggttgtttctgcaaccccaatcaaggaaacggttaaaacaccgcgtcaggagtgtcgcaacgtcacagtgacccatcgtcgaccggtgcaggatgaaaatcgcattaccgggtcggtgctcggcgctgttgctggcggcgtgatagggcatcagtttggtggtggtcgcggtaaagatgtcgccactgttgtgggggcgctgggtggtggatatgccggtaaccagatccagggctctctccaggaaagcgatacttacacgactacgcaacagcgttgtaaaacggtgtatgacaagtcagaaaaaatgctcggttatgatgtgacctataagattggcgatcagcagggcaaaatccgcatggaccgcgatccgggtacgcagatcccgctagatagcaacgggcaactgattttgaataacaaagtataacaaggctgtactctgcaatttggcccctcattcgctcaggctgaggggctttttttgcgacttatttcaccagttcgggccataaacgcaaagtcgttccggcaatctgcatcagtttttccagcgatgcaccttcgcgtgcgctgatcgacatcccctgaataatacaattaaggaattctgccagatgtgtcacgtcacagtggggcgggatttccccgcgcgcttgtcgttgacataaaaactgctgcaaagtgcgctcttgcatcgcatggcgtgatttcaacgtattggcgatatctcctgaatctggggagagggtggtgcagttgttgatcatgaagcagcctgccggggtgtctttgctggtaaagcagttggcgatggcagcaaaatagtcagccagcgcagactccacgcttttctcttcacaaaacagctgtgcttcatgcttagcggcaaaacgatcgatatagcggtcgagaacggcacgaaataacccctctttgttggtaaattccgcgtatagcgtgggcgctttggctccggtcgcttcgacgaggtccgcaagagaagtcgcttcataaccgtgttgccagaacaatttcatggccttatcaagcgcggcatccctgtcgaacacttttgggcggccacggcttttttttacacattgtgttgagtcagttgccatgatgccgttgtacctggtgactgtgaatgaaaggttattataaaaataatcacctccgttcaccagtccagatcccataaaaataattgctttctatttaactgaaatttaaagatttttaaattaattaatgattgttataaaaaatatcttgtatgtgatccagatcacatctatcatttagttatcgatcgttaagtaattgcttgcgacgtcattcatctgcataaggccactattatgaaaaacgtaaaaaccctcatcgctgcggcgattttaagctccatgtcatttgccagctttgcggctgtcgaagttcagtcaacgccagaaggccaacaaaaagtcggtacaatcagtgctaacgcggggacaaatctgggatcgctggaagagcagctggcgcaaaaagcggatgagatgggcgcaaaatctttccgtattacttctgtaaccggtccgaataccctccatggaacagcagtaatttataaataagcattaaccctcattaatgcctgctactgctgattttttccccgcgacatgccgtgtcgcggggatttttttatccgggctttacagcgtttgtgggctcacttgatgacggcggacatccaccggcatcccggaacggacatccatcacatgttgcatcacttcagcgtcagtttgtgctgcatctttaaatgattgcattgcgctattcagcgtaattggcagcagctgcggatcgtcatcaatcttctctgacagcggctgatgtacttcaaccagacgcgcaccgtttggttcggcagagacttttatcggagtgttgatgatattcactttggtgcctggggtgacctggctaaagagtgttttgatatcgtcatcccgcagacgaatacagccagaacttacccgcatgccaatgccgaaatcggcgttcgtaccatgaagcaaataaacgccgccataggccgccagacgaatcgcatgatggcccattgggttatccggtccagccggcactaccgcaggcaactcaattccctgtgctttataacgggcgcggatgtttgccgttggcgtccaggttgggtttgcacgtttgtctgaaacggtggtcaccattgtcggtgtcagcgtgtcaccacctaactgaccaatacctattggatacacggttaccgaatttttacccggcgggtagtaatagagacgcagctccgcaatgttgatcacaatgccttcgcgcggcgcatctggaagtagggtttgcaacgggatcgttaacacgctgcccgcgcgcggtacgtaaggatcaacgccggggttagcctgtaacagagcgagaaagccgacgttgtattttttggcgatggcttccagagaaccaccgtcattttccaccacatgaaatttgttttcgccaaccagacgactgcccgctggcggcagcggccaggtgttggcttttgccggtagcgccagcgccacggcagcggcgaacgtaaaaaacgttagccagcgagaaaaacgcgttttgatcatcaccaaaaatccataataaatataaggttattgtaataaacagataagcctgaattatggatggtgacagtgtcggatagtgcagggaagtgcaaagaatttgtaaatgttgcagatgggggcgcagaaacgcccccgatttaccattaagcgatcgcgttctcttccagttcacgcataaactggcgtacccattcgatacgcgttttccgctcactcaaatcctgaataaatttcaggcgcgtcggaccatcaaggcggtaatgctgcggctgtttttgcagcaaaccaatcaaccaggccggattaacgtgattcttctcggcaaattcgatcaccccgcctttctcattaccttccagcttcctgatccccagtttctgcgcttgctggcgcagacgggcaatatccagcagggtacgcgccggatctggcagcaggccgaagcgatcgataagctcgactttgatctcttccagttcgttttccgttttggcgctggcaatacgtttgtagaacgacagacgcgtgttcacgtcagggatgaaatcatctggcaatagcgacggcatccgcagctcgacttctgtttgctggctggtgagatcttccagcgacggctcgcgtccggctttcagtgcatcgacggcgttttccagcaactccatatacagcgagaaaccgatggtttccattgagccgctttgttcttcgccaagcagttcacccgcgccgcgaatctccagatcgtgcgttgccagcgcaaaacctgccccgagatcttccagcgaggcaattgcttcaagacgtttttgtgcatcggtagtcatcgcttttggatgcggtgtcagcaaccatgcatatgcctgatgatgcgaacgtccgacgcgaccgcgtaactggtgcagctgcgccagaccgaagtgatccgcgcgttcaatgataatagtgttggctgtcgggatgtcgatcccggtttcgataatggttgtacaaaccagcacgttgaaacgttgatgatggaaatcattcatcacccgttccagttcgcgctcgcgcatctgcccgtgaccgatggcgatccgcgcttctggcaccagttctgccagccgttcggcggctttctgaatgttttccacatcattgtagagataataaacctgtcctccgcgcaaaatttcacgcaggatcgcctcccggaccaccatgctgtcatactcacggacaaaggttttaactgccagacgacgggcgggcggcgtggcgataatcgacaggtcacgcattccgctcattgccatattcagcgtacgtgggatcggcgttgcagtaagcgtcagaatatccacgttcgcgcgcatcgctttaatgcgctctttatgacgcaccccgaagcggtgttcttcatcgacaatcagcaggcctaaatctttaaacttgacgtcactttgcagcagtttgtgcgtaccgatcagaatatcgattttcccttccgccacttccgcaaggatttgcgtctgctctttggcgctgcggaaacgggagatcatttcgatacgtaccggccagttggcgaaacggtcgcggaagttgtcgtaatgctgctgcgcgagaagggtggtaggcaccagcaccgccacctgcttgtggttatctactgccaggaaagctgcgcgcatcgccacttctgttttaccaaagccaacatcgccgcacaccagacgatccattgccagcggctgacacatgtcgctaagtaccgcattaatggcctgcgcctgatccggcgtggtttcaaacgggaagctgtcgcagaacaactgatactgctcacgatcgtgtttaaacgcgaagccctctttggcggcgcgttgcgcgtagatatccagcaattccgccgccacatcacgcactttttccgccgctttctgccgcgcgcgtgaccacgcatcgccgccaagtttatgcagcggggcgttttcttccgcgccacctgcgtaacggctaatcagatgcagtgacgacaccggaacatacagtttggcgtcgttggcataggtgagcatcagatactcgccagtaatgccacccgcttccagcgtggtcattccggcataacgaccgacgccgtgctccagatggaccaccggctgaccaatatgcagttccgcaaggttacggatcagtgtatcggggttgatggtgcggcgagaatcctgacgacgacgggcaacgcgttcaccgagcagatcgctttcgcaaatcagcgccagattacgcaccgtatcgacaaaaccatgttcggcagcgccaatcatcagataacgcccacggtcgctggcttcatcaagacgcataatgcgttgcggagcaattttaattcgtgcgagcagttcacccagcgcttcacggcgaccttcactttctaccgagaacaccaccggaccgtcgaaagtctcgaggaacttacgcagcgcatccagcggcgctttttgttgtgcctgaacggccaggtctggcagtttctggaaacctaaattggcattcgcggcttttgtcggtaaatgttcagtttttagctgcagccggggccagtttttcagctctgagaagagctcgtccacccgcagccagagcgattgtggtggcaacagcgggcgcatcggatcgacgccgcgattctcaaaacgcgccagcgtgtcagcctggaaacgttcggcactggtttccagatcgccagtattcacgagcaaggtattggcagggaaataactgaacagcggcggcagtggttcgctgaagaacaatggctgccagtactcgatcccggcaggtaatgtgcctttactcacttgctggtaaatatgttctggatcgcgcttcacttcgaaggtatcgcgccactggctgcggaacagttcaattgccgctttatcggtcggaaattcgtgcgcgggcagcagattgatcgcttctacttcctccagcgtgcgctggctgtcgacgtcaaacacccgcaggctgtcgatttcatcatcaaagaaatcaagacgataaggcagctcactccccatcgggaagagatccagcaacgcgccgcgcgtggcgtattcgccgtgctccatcacctggtcaacatggcgataaccggcgctgtccagttgggttcgtaatgcatctcgtgacaggcgctgaccttttttcatcaccagcgcatgaccgtggagaaaactgtgtgggcaaacgcgctgcataagcgtattcaccggaacaatcagtacgccacgctgcatcgtcggtagctggtaaagggtggaaaggcgcgaggagataatgtcctgatgaggcgaaaaactgtcgtagggaagagtttcccagtccgccagattcatcaccatttgatcggtaaactggctgatttcatcatgcaaacgcagagcattttgcatatctggtgcaatgagtaccaccggaccggcgtgacgttcggcaatttccgctaccagcgttgcacaggctgcgccggttaactcgcccagcagacgctgctcacccgctttgacgggcagcgtataacgatattgttcaggcataacggttgtcagattctcgttaggatatgcctcaacatatgggggcatatctctgataagcaatgctgttcattatccgtaatcgacatggtttagcaaattgaatcgccccggctggggcgatggcttagcgggagtaactgacggcagcgggcagtgaaggcggggagaacaacagatcgctgaatgcacgctgtgaaagttttcttaccagcaagcccgcaacagtacagatgaacaaactgacaaagggataaaccagcaggagtgtcagttcgacttgcggcgaccagcgtgctgcgttcatttgcgcaagcagagttaagctgaatatttcaaccagaatgcgatgggtggtgtagatagcaatggtgttggagccaatcacattcagcaggctggtggagcgcataccgaatcgttgctcgtattgataaaacagcttcatgatcaccacaatcgataccagcgacaacagcagcgagatagtaaacaaccaggcaccgaccgccagaacggtaagcaaagaagccatcagcagatggcggcgcaacggcacctctttaacacaggtcattattgttgcgccaaaccatgcgccaaggctgtaataaggcaaattgcggatcacactgttcattccccaccacggcgtgggaacgaaattaaccgccacactcagcagtacaaacaaggcgaatagtggcagcgccagacggctaaaaattttacataccacgaaatagacaattaacgcatacagataccacaagctggtgctggcggtgatcatcccgtgcaggaactcaccggtggaatcggcataagcggcattggaggcattgcttaaatcgcgctcaggtgccagccactggttcagcgcacttaacgccagccactgcaccacgccccaaagcgccagcacccagaagatgttccagatccgtttatcgagacaatttccccacggtacgctgtcgatatagcggcgaatcaaatagccggatataaagaaaaaaaccggcatacgaaagggggcaaggtaaagattgaaatagatccagcatttgctcaggacttccgataacggatgctgaaaagtggtcagatgcggataaaaggtaatgaccgagtgataaatcaccaccagacaaatacataaccctttgatctggttaatccatagctctttttgtttcatcaggacaacacgctcttttttaatttacatgcggttgatcctgcgggttatgacccgaggtgtaatgggtatctgtctgtattggatgatttttcagattaagatcaggcggcaagattgatgataaaacatggcaatttagccgattgatttacgggggcttttcagattagccctgacgatcacttacagttcagacgtttacccatcttgctttcgcttatatactcgtgtctttgctacagcaaccagacggatttcatgtaccaacctgtcgctctatttattggcctgcgttacatgcgtgggcgtgcagcggatcgcttcggtcgtttcgtctcctggctttctaccatcggcattaccctcggggtgatggcgctggtcacagtattgtcagtgatgaacggctttgagcgcgagctgcaaaacaacatccttggcctgatgccacaggcaattctctcttctgagcatggctctcttaacccgcagcaactcccagaaacggcagtcaaactggacggcgttaatcgcgtcgcacctattactaccggtgatgtggtactgcaaagcgcgcgcagcgtggcggtcggggtgatgctcggtatcgacccggcgcaaaaagatccacttacaccgtatctggtcaatgtgaaacaaactgacctcgagccggggaaatataatgtcatcctcggcgaacaacttgcctcacagctaggcgttaatcgcggtgatcaaatccgcgtgatggtaccatctgccagccagttcacgccgatggggcgtattccaagccagcgcctgttcaatgtgattggcactttcgccgccaacagtgaagtcgatggctatgaaatgctggtgaatattgaggatgcctcgcgtctgatgcgttatccggcaggcaatattaccggctggcgtttgtggctggatgagccgctgaaagtcgactcattaagtcagcaaaaactgcctgaaggcagcaaatggcaggactggcgtgatcgtaaaggcgagttgttccaggccgtacgcatggaaaaaaatatgatgggtttactgctgagcctgattgtcgccgttgcggcgtttaacattattacctcactagggctgatggtaatggagaagcagggcgaagtagcgatcctgcaaacgcaaggcttaactccgcgacaaatcatgatggtctttatggtgcaaggggccagcgccgggattatcggtgcgatcctcggagcggcgcttggcgccctgcttgccagccagttaaataatctgatgccgataatcggcgtcctgcttgatggcgctgcgctgccggtggctatcgaacctttacaggtcattgttattgcgctggtggcgatggctatcgcgctgctgtctacgctttacccttcatggcgcgctgccgccactcaacccgctgaggctttacgttatgaataagatcctgttgcaatgcgacaacctgtgcaaacgctatcaggaaggcagtgtgcaaaccgatgtgctgcacaatgtcagtttcagcgtcggcgaaggtgaaatgatggcgatcgtcggtagctctggttccggtaaaagtaccttgctgcacctgctgggcgggctggatacgccaacctccggcgatgtgatttttaatggtcagccaatgagcaaactgtcgtcggcagcgaaagctgaactgcgcaaccagaagctgggctttatttatcagtttcaccacctgctgccggattttaccgccctggaaaacgtggctatgccgctgctgattggcaagaaaaagcccgctgaaatcaacagccgtgcacttgagatgttaaaagcggtggggctggatcatcgtgcgaatcaccgcccatctgaactttctggcggcgaacgccagcgtgtggcgattgcccgtgcgctggtgaataacccgcgcctggtactggcggatgaacctaccggtaacctcgatgcgcgtaacgccgacagcatcttccagttgcttggggaattgaatcgcttgcagggcaccgccttcctggtggttactcacgacctgcaactggcgaaacgtatgagccgccagttagaaatgcgtgatggtcgtctgacggcggaactgagcctgatgggggcggagtaatggcgatgcctttatcgttattaattggcctgcgttttagtcgcggacggcggcgcggcggcatggtgtcgctgatctccgttatttctaccattggcattgccctcggcgtggcggtattgatcgtcggcttaagcgcgatgaacggctttgaacgcgaactgaacaaccgtattctggcggtggtgccgcatggtgaaatcgaggcggtggatcagccgtggactaactggcaggaagcactggatcacgtgcaaaaagtgccgggtattgccgctgccgcgccgtatatcaatttcaccgggctggtggaaagtggcgcgaatcttcgcgcaatccaggtgaagggcgttaacccgcaacaggaacagcgtctgagcgcattaccctcgtttgtccagggcgatgcgtggcgcaattttaaagcgggcgaacagcaaattatcatcggcaaaggcgtggcggatgcgctgaaagtgaagcagggggattgggtgtcgattatgatccccaactcgaatcccgagcataaactgatgcagccaaaacgtgtgcgtttgcacgttgccggtattttgcagttgagtggtcaactcgatcacagttttgccatgatcccgctggcggatgcccaacaatatcttgatatgggttccagcgtgtcaggtattgcccttaaaatgacggatgttttcaacgccaataagctggtacgcgatgcgggtgaagtgaccaacagctatgtttatattaaaagctggattggtacttacggctatatgtatcgcgatatccaaatgatccgcgccattatgtatctggcgatggtactggtgattggcgtggcctgtttcaacatcgtctccaccttagtgatggcggtgaaagacaagagtggcgatatcgcagtattaagaacgctgggggcgaaagatggtttaattcgcgccatctttgtctggtatggattgctggcagggctgttcggcagcctgtgtggtgtgattatcggcgtagtggtttcactgcaacttaccccgattattgagtggattgaaaagttgatcggtcatcagttcctctccagcgatatctattttattgatttcctgccatcggaattgcactggctggacgtcttctacgtactggtcacagcattgttgctgagtcttttggcaagttggtatccggcgcggcgcgccagtaatattgaccctgcgcgagtccttagcggccagtaaaggcagtacattaaaacaaggagcggcaatgtattacgggtttgatattggtggaacaaaaattgcgcttggcgtgtttgatagcggtcggcagttgcagtgggaaaagcgggtgccgacaccgcgtgacagctatgacgcatttttagatgcagtgtgtgagctggtagctgaagctgaccaacgttttggctgtaaaggttctgtcggcatcggtattccgggaatgccggaaacagaagatggtacgctgtatgccgccaatgtccccgctgccagcggtaaaccgctgcgtgccgacctgagcgcacgtcttgatcgcgatgtacgccttgataacgatgccaactgttttgccctttcagaagcctgggatgatgaatttactcaatatccactggtgatggggttgattctcggcaccggtgttggcggcgggctgattttcaacggcaaaccgattaccggtaaaagctacattaccggcgagtttggccatatgcgtctgccggttgatgcgttaaccatgatggggttggatttcccgttacgccgctgcggctgtggtcagcatggctgcattgaaaattatctgtctggtcgcggttttgcgtggctgtatcaacactattatcatcaaccgttgcaggctcccgaaattattgcgctttatgatcaaggcgatgagcaggcaagggcgcacgttgagcgttatctggatttattagcggtttgtctgggaaatatcctgaccatcgttgaccctgacctggtcgtcattggtggtggcttatcgaatttcccggcaatcacaacgcaactggcggacaggctgcctcgtcatctcttacctgtagctcgtgttccgcgcattgaacgcgcgcgccacggtgatgcgggaggaatgcgtggtgcggccttcctacatctaaccgattaaacaacagaggttgctatgctgtcgcgtcggggtcatcggttaagtcgttttcgtaaaaataaacgccgcctgcgcgagcgtttgcgtcagcgtatttttttcagagataaagtggtgccggaagcaatggaaaaaccaagagtactcgtactgacaggggcaggaatttctgcggaatcaggtattcgtacctttcgcgccgcagatggcctgtgggaagaacatcgggttgaagatgtggcaacgccggaaggtttcgatcgcgatcctgaactggtgcaagcgttttataacgcccgtcgtcgacagctgcagcagccagaaattcagcctaacgccgcgcatcttgcgctggctaaactgcaagacgccctcggcgatcgctttttgctggtgacgcagaatatcgacaacctgcatgaacgcgcaggtaataccaatgtgattcatatgcatggggaactgctgaaagtgcgttgttcacaaagtggtcaggttctcgactggacaggagacgttaccccagaagataaatgccattgttgccagtttccggcacccttgcgcccgcacgtagtgtggtttggcgaaatgccactcggcatggatgaaatttatatggcgttgtcgatggccgatattttcattgccattggcacatccgggcatgtttatccggcggctgggtttgttcacgaagcgaaactgcatggcgcgcacaccgtggaactgaatcttgaaccgagtcaggttggtaatgaatttgccgagaaatattacggcccggcaagccaggtggtgcctgagtttgttgaaaagttgctgaagggattaaaagcgggaagcattgcctgatgcactacgcttatcaggcctgcaaggggacgcaattaattgaatttgcgggttttgtgggccggataaggcgttcgcgccccatccggcataatacacgcgcacttttccggcctcttttatcgtttactcgtcaataacaatgcggcaataaacgtacagacaccaattagccctgcccagagtggcgatattctggtaatcgcaaagctattatcgatatacaaacataaagcctgataacccatattggcaatagtcatcgccactgcaaattttaacgcataaataaaacgagtcgtgtagtaaaagatcctggaaaataagataaacgtcgcagcccaggcgataaaacctaatgtgttggtgctgccggggggagcattttcatgctgttgtcctggatgcggataatacgttagtggcggcgtcgattgttttaatatctgtgcttgtagaacagccaatgcattattgattccctgataccagagatctgcatttaaataagccagcgtgtgattttctatcagaaggccgagatgtttatcgtccagaccactttcaacctggccgttggtgatcataattaaccgtggttcgcgggtagtaaatagtaacagaacacttccttttacatcactcaatgaagatgatgcatgcgccagcatcgctttaccattttgtctgagactggcttcattattaatgtcgggtaaaaccacaataaacggtgcaattcccgtttgttggcgaaaaagctcggctttatgcgcgatctcttcagcatctggtacagtaccggtaacgtccgtaaaaagtgtcttcattattggaattaatggcttgctggctgctgtcagaggcaggagtatcagtaaactgagcagtataatgaattttttcatgggcgggacttccgtttcctgcgtgattttttagaggagggcatacttattaataaaccgacggcgataaaaataacgcccataatgccgataaacccccatttaaaaaaattaacccacgggttatttatctcagccttttcaggatgcccgggagaataataaacattaactttatcgccttcgctgtcttcataaaaatcgctgccgatactcgaattgaaaattagcgtgtaatctggcgtcggtcgaaaggcaacgacgggataccacgaaccatctttacccgtgcgatgagaatgactggagtgccagacggtatcaacaatgacgccttcggtatgaatcgcgtctttgctataggtgaactggttataaaagacaacaacagaaatgaggatcagtaccagaccgataccgaggaatatacgaaagaaaacttaactgtcctgactcattagccacatccttgctaactaaaaaacgggcggtaataccaccgcccgcttgctgaattaacgtcctgctttcagcttctgataatactcttcataaatgctgctggctgcgccaacgtcattctgccattcgccatttttaatggtttcagcatccgggtagagtgttttatcgttcgccacttctggacttaacagcttacgcgccgcaaggtttggcgttggataaccgatagtttcagcaacctgttttgccacatccgggcgcagcaggaagttgatcaatttcagcgcgccttctttgtttttggcatttgccgggatcgccaggctgtccatccagaaaatgccgccttctttcggccacaccacgtcaattggcgtacccgcctggcgtgcaacgaaagcagaaccgttccagatcatgccgaggttaacttcgccttccatgtacgggttcgccgggttatcggagttaaaggctgccacgtttggcatcagttttttcagctcgttatatgcagcttcaatctctttcggatcggtggtgttaccggagtagcccagcttacgcagcgccatctggaacacttcacgggcatcgtcggtcaacagcaggctgcctttgtactctggcttccacagatcggcccagctggtgacagatttcggatccaccgcatcaccgttaacaccaatcgccgtcgcaccccagatatacggaatggagtagtcgttattcgggtcaaaaggcttgttgagcatgtctggatcgagattgctgaagtttgttaacttcgacttgtcgatcttctggatcatcccttctttacgcattttatcaacgtaataggttgaaggaaccaccagatcataggcaccgtctttgtatgttttcagcttggcgtacatggtttcgttcgactcgtaagtcgaatagataaccttaataccggtttctttggtgaactgttcaagcagtcctggcggcacgtactcggtccagttgtagaaatacagcgtgttgttgtcatcggcgtgagcggcgctcatgcccagtgccagcgcacccgccgcgagcaggtggcgtgaccattttttcatttaacgtcccctgtgttacctttcgttttatcacgagcaataagctggctggcaataaccatcaccagcgacagcaccagtaatatggttgccagcgcgttaacttccggcgatacgccgactttgaccatcgaataaatttttaacggcagaatttcataacttggtccggtgacgaacgaagaaactaccacatcgtccatcgacagggtaaagcttaacacccagcccgccgccaccgctggcattgccagtggcagaatgatttttcgcagaatggtaaattcgctggcaccgagatctttcgccgcttccagcattcgcacgtcaaaacctttcaggcgcgaatacaccgtcaccaccacaaatggcaggcagaaggtgatatgcgagaacagcagcgaccagaagccaagctgaatacccagcagcataaacagcaccagcagcgaaatcgccatcacgatatctggtgacatcatcaccacaaacagcattccgctaacgaacggcttaccacgaaagcgataacggtacagcgcaactgccgtcagtgaaccgataagcgtagcaaacgtcgccgaaaacaccgccattgttagtgaatgctgcgctgcctgtaacaggctgtcgttgttcatcagcaggctataccatttggtggtaaaaccctgccagttgatgccaaagcgcgagctgttaaaggagttcacaatcaaaataatgattgggatatacaggtacgcgtagatagcggtcataaaaccgccgcgaagcagtcgaccgatcattcgagttccaccttcttattcataaggcgggacactttcaggattttgaatttattcaattttttcctttctccaaaatctctccaaaacgtttccccaaaactaggccacgcattttacaacacttttttcctgagatggtgacggatattccatatggtgtttgtcaaataaccaacttaacccattcctgacctcgagtatcgttatagcgatcggtggttgcctggactttatgtcctagtaatgtttttgtatcgataccctgtgcacggtacagccgttctgatagagagcgttgttcatgaaatgttggcggagtttttcctgctggtggaattatcccagccagatcccgtgctttggcaaagtagtcgctcaggttgtctttactcatcggcttcggttgtttctggtgccgactatggattagatatggacttaatattctgtctcggcacccatcaataacttcttttaacgttatcccaatggcatcacagcgtagtgtaagcggtaacgccagacgcattccggtttttccctgggtgatatgcaaatgttcgttccacacatctgaaaaacgcatgtggtaaatgtcatcacggcgctgaccagtaacaatcgcaagaagcattgcgttacggataaagtgtttttctggcgttgcgttgtaaattttttgccagtcttccagggtgagtctggctctggttactttagggatcggtttacgggtggcctccggaggattccatccaggaggaacttcccctgcatgctgtgcttctttataaatatcaacccataatccacgatttactctcgctgtgctgaccatgtctttatccagccactcatccagtattaatgcaaagtctcttacttccagttctttcaatgggtggtttcccagacgggaaaccagatatgcagccattctggctttttctttgtgagttgtagctgcaatatctccatttttcagtcgcgtgtcctgtattttcagatatcgatcaacccatgcctttaatctgataccccgacgcgttgttgctgacggactttcatcaattttgcgcatgaaatattcagcctctgctgcagctattcgctgattggctgtggaagcgattttttctgccttacctttgtctgttccgagcccgtgaaattttccagtcacagggtttttatactggtagtaaactctgccagttctgcgatcaaatttttcgtaaagtccggctacgtcagtgctgttttttcgtggcctcggtgacatgagttaaaatctccttcagtgcatcatcatcgccagtatgaatttccggcgcaattcctgtttcaccaggtccaacaaatactgctcggcgatctatcagccaacgcccacgaattttttgtggtcttggaacgatgtatcctagttttccgtatttcaccagggtagtgtttgttattgggagactgaaccgttttggcttccactcatcgagcgttatcaggtactgttcgctcatggctatcactccggaacgcgccagttgcagaataccaacgacaactggcgacggttgaacattaaaaatcagcctgactcgggatcagtttttgccagatagctgaaacgtattttgcctggtaacgagcgtcatcaagtgcattatggcgctcaccttcgaatggaatagccgttctggcatcgaagtctatggctttccccagctcaacgattgtgcgtacatcgcgatcgttgtagtaacgccacgggcaggggatcccctgccgttcgtatgaacggcgcaaaatcgtgttgtcgaagttggctccatttccccagacctgaacaaaaaattcaccggagttttcgtcgataaattctcgcaattgtaacagtgcatcatctaacgggatttcatcggtcataatggcagattgcgcttcgcgtgattgcttcagccaccatttaatggtgttccgatcaatgactccgccagcagtttccagatcgatagtcttactaaattccggtcccatatctccggtttgcggatcgaaaaatattgcacctattgagataaccggggcatcaggattttttcccatggtttcgaggtcgatcattagatggtcacacgtcctgctggtggatgtgatttcgtgatgaccgttcatcttaattgagtgatctgccgcctcgccagtttcattatcgctggcgtggtcctgagcgctgccagcattctccttgtgtggatgttcagcgccttccattttctccggatcgttttcctgaacttcaacctgattctcttcatcgaatgtttcctggtatgttgcgtcgcccatcaccgcgccacaatcagggcagttgccgccaccgctctgaccgcaggcggtgcagactttttccgcttcctgttgcgctactggctcaggttgttttgtttccggctcgttttgtaacgcatttgggctgttttgttccgctttctggtcgttctgttccgtttcttgctggttctggttcacagaatcgcgggtttcaatccccttcacccatttcggatcattcgggtcgctaatccctgcaacaaattctccgcgagaggcagcaagcagttcattagcgtcaggctggctgatattggctgcctgcataattttgtttacttcgtcagcggtaacttttaccggctctggttgtgcggtcgtgtcagatgcaccagtattttgttgtgagcctgagtatgtaccgtttttgcgggcaaaatattcttctttcgtgatttcagtagcccctgcagccagcgccttattcagaccagaaagtttgtttgcacgaccatatttttcgccatccttatcggtgaaaaggaagtagaacggcccctcacgctctacagatggttcagtttccagcgtgctttcatttttttgggtatcagatacttcagtttccactgcatcagtttgtgctgctgacggctggagaatatcagcagcgttctggtctgtttcttcatcctcaaacacgccctttgtcgccaggtattcagtgatgtatttgttcagtgctacgggatctttgtgaatgtcgatcggacgctcacggacaaggccaaaaatagtctgacggtcgtagcggacggcatcgggttgtttgcgcattgatgcggaaatgcgcttccagtcttcgcgatctttgtcgataacttcattgtttctggctaaccagcaacgcgcgccagattcggttttaaacgttttgcttttggtatatgtcatcgcggtgaacgtaccgtcctggttggggaacacgccgcataccagagattcgttgttgccaagatcgatagtatccatgctgacctcatttccccttaacgccggggtagcggaacaaaaacctgctgcatagttattaaagttgaaccctgccgtcatgttcttacgcctcgggctggctacttaacccctgaccactgcctggtaactcgaagtattgccctgcattctgtggggcggggtgggttggtatttttagtttaataaacattaaacttaagtcaagtaaaaactaaaccacggggcgtaacaaacacaacgcttttgataaagtcgttgcggttgttatgtttctattggtagtgaaagttagggaaactggcgtcttgcgtggatcacgtttactacttcaacgcttgatgttgttacgcggtatagaattatatagttagggtgggctacaatctcacgcaagccaggtactctgtcgcttggtgggtataaatacggatgttcggataacggcagcacacaaccccttaatcgctgccataagcgttcagccgcatctatgtcgaaacgagcaatatagctagttatatcatctaggtcggtatctgcgctttcaagccataacacgggtaacattttactgcttgctccgttccttgcgcattttagcaaagcgttctgccattctgcgctcaacttcgtcatggggaattgctgggcgcggatctgcaaggctcgttgctactttcgcacgcagccattcgttgtaactgttttcttgttcaatggtttcaaattcagaaaccattggtgaaagggctctattcatgtttcctccggttttataactcaggcgcggcggcatttttgcgccgcaatccatctcgctatgagatcttccattgattcttttttctgctttaactcgctgattatctggcgttgctcatcctcagggaaggctgaaaaaatctgcaataattccagttgattagacgttaaccctgcatgtggtggagaaacttccggttgttctgcgtattccgcatccagatacccttccggcatcccgtatgtttgctctattcttctggcagccttttctccaaacgaggccctcccactcattagttgagataggtagctcttctctttgggtggcagagttttatctttaaaccactccttgagacgtaaacggcgaatttcttttttttgcatgtggtaattatctttagtaatcactaaacaagcaaatacttgacttaatggtttattaaacactaaactcgcaaaaaaacactaaaccgaggaaggtatgacattaaaagagtttattaaatcattgagggttggtgatgctaagaaattcgcggccagacttggtgtatcgccatcttacttatcgcaaatggcgtctggacgagcagctatatctccaacccgcgcccttatgatcgaatctgcgacggaaggccaagtaagtagggcggagctacgaccccatgattgggagcttatttggcctgagtatgcgagcggcattcgtttggggcaaacacatgtagttcatgctgaaggtgattgtagtgcatgcttatctgatggagttgattcatgaaaatcaagcatgaacacatccgcatggcgatgaatgcctgggcgcgtcctgatggcgaaaaagttccagcagctgaaataacccgggcttattttgagcttggtatgacgttcccagagctatatgacgacaggcatccggaagccctggctcgcaatactcagaaaattttccgctgggtggagaaagacacccctgatgcggttaaaaaattcaggcgctgttaccggcgatcgaaaaggcaatgccacctctgctggtggcccgaatgcgcagccacagttcagcctattttcgggagctggtggagatgcgggaacgactggtgagagacgctgatgattttgtcgcagtggcgatcgctggtttcaatcagatgaatcgtggtggtccggcgggaaatgccgtggtgatgcactaaaagcacggtgttcggagttttttatgagcagcaagcttcatggtcttgtctgggaagggtgtgccttcaccggcatgatcttatccagggtggcagttatggctcgccttgcagattacagcaatgacgaaggtgtgtcatggcctgcagtggagaccattcgtcgtcagattggggcaaagagtgaatcaacggttaaagctgcgatagcagaactggaaaagaacggctggctgacgaaggaggaacgtaaggtcggtgggcgtaatgaaagcaatatctaccgtcttaatgtggaaaaactcgaagcagcagcagcggcagcgcgtgaggcatataaaccgaaaagaaaaattagccaggcaaaaaatgacccgtcaaatattgacccctcaacggttgacccgtcaaattttgatggatcaaccgttgataaaaaacagccggttaggggggcgatggttggccccgatccgtcagtattaaaacctgatccgtcagataaaagatcttttcgtccggacgcttcgcaaccggacccgcagacggctgaacaggattttttaacccgacaccctgacgcggttgtgttcagtgcgaaaaaacgccagtggggcagccaggaggatttagcgtgtgcgcagtggatctggggacgaatcgtgagtctttacgagcaggctgccagcgatgatggcgaaatcatgcgaccgaaagaacccaactggactgcatgggccaatgatgtgcgcacaatgcggatgctggatggcagaactcacagacaaatttgcgaaatgtttggtcgggtacagcgggatccattctgggtaaaaaacgtcatgagcccgtcaaagcttcgcgaaaaatgggatgagctggttattcgtctggggcgttcgcctgtacagcgttgcgtgaatcacatttctgaaccggacaccgaaattccgccgggattcagggggtaacgaagcatgaaaaatattgcgacaggcggtgttcttgaacgcatccgtaagctggctccgcagcatgtaaccgcgccataccgaacagtggacgagtggcgcgagtggcaacttgcagaaggccagaagcgttgcgaggagatcaaccgccagaatcgtcagttgcgggtggaaaaaattctgaatcgctccggcatccagccgttgcaccgcaagtgctcgtttgcgaattaccaggtgcagaatgacggccagcgatacgcgttgagccaggcgaaatccatcgccgatgaactgatgaccggatgcacaaatttcgcattcagcggaaaacctggtaccgggaaaaaccacttagcggcggctatcgggaatcgcctgctgaaagatggccagacagtgattgtggttaccgtggctgatgtcatgagtgctctacacgccagctatgacgacgggcaatcaggcgaaaaatttttgcgggaactgtgcgaagtggatctgctggttcttgatgaaattggtattcagcgcgagacgaaaaacgagcaggtggtactgcaccagattgttgatcgccggacagcgtcgatgcgcagcgtggggatgctgacaaacctgaactatgaggccatgaaaacattgctcggcgagcggattatggatcgcatgaccatgaacggcgggcgctgggtgaattttaactgggagagctggcgcccgaatgttggtcagccaggtattgagaagtaatttttaccgggaggaaattttaatggagaccgtttttgacgcactgaaagcgatgggaaaagccacgtcggtagagctggctgcgcgacttgatatcagtcgtgaagaagtactgaacgagctgtgggaactgaaaaaggctggcttcgttgataaaagcgtatacacctggcgtgtggctggcgaaggtgaatcaggggtagccgaagagcagccagcacaatctgaagtacaggatgtgctaaccagggaggtcgaacgaaaagttaccgctgacatgatgattgagtttatcggtcaggagggagctaaaacgtgtgaggaactggcgggtaagttcggtgtcagcactcgcaaggttgcttccacgctggcggtagtaaccgcaacggggcggctggcacgcgtaaaccagaacggtaaatttcgctactgcataccgggcgataatttaccagcagagccgaaagctgcattggtagcggaaactgatggtaaagcctttcctcagccagcaagtgttgcgttaccagtacaggaagctgcaacacaggaagatattaaaacagaaactgtggcggacattgtgcagtcgctgccatcgttcactgaaacacgagctgatggcctgattttaccatcgctgcatatggcaaaccgcgaactgcgccgggcgaaaagtcatgcccagaagtgggagcgagtttgcgccgcgctgcgggagctgaacaagcaccgggatattgtccgacagattgtcgattcctccagtcgtattgtgccggaaaagtgattcctggggagggcttatggcaaaagtatttacacaggaagagcgagaaaaaattaaagggcaggttgttgagctggtacgccagagcgggcgcgagacgttacggcaactggaagcgaaaactggtgcgacaagatatctgatgagtgttatcgccagagagctggttgccagtggcgatgtatataactctggctacgggttattcccgtctgaacaggctcgtaaggactggcaaaacgcccgcaaaaaactctcaagggcaaatctgaagaaaccatctgtggttgatccggaccttatctggtcattaccagacggagaaatgcgtcgctacgataggcgcctgaatataatctgtcgcgagtgccggaagagcgaagctatgcagcgtgtactggcattttaccagaatggttttcgagagacattcggtgaacaggttgtgcatgagggaaatcatggcgcttaggcaattgtgtagacgcgttgacggtcgaaagcataggagggttgattgatcgttctagttatgctgtcagagcgaaagcgcaggaactgggtatcaataggatgttaagagggggggggttataaccaatcaaaaaaacatccgcaaagcgatattgagctagtgcggaagcttcatcagtgtggagttccccgccgtgatatcgctgtaaaacgcgaaatgtccttgggcatgattaatcagtacgtttatttcgacaggagagcgcatgaagtttgacatctagacaactgggggagcgctgaaaacgttcttaattgatgttggattcgctttacatactgaactgtttggctgaaagacacggtagtatcaccaatcaaggtgcttttgataaacgcttgtgtgtttgttttttaatccattgttgacaactaggttagttttccatatcatcaataaaagtgtaaaactaatggtggcgatatgactagtgaatcaaatgttaatgctctgatagagcgtcaattcgaagttgctgacggtaatgtaagaagtcttaatttgccgaaatatgataaatatacagtatgtaatttacggggaggcattggtaagacatctttaacttttaatctgtcatatttggcggataacgcattaatcgtggatacgtgcccgcaaggaaatttatcatatttttttgacaataattatgcatcttcgtctagcacaactgcaaatgacctcttaatgccttattttgttccagggcttggatttgcaacgcgtgctgcaaagctagtatcatcaactaatgcttggtttgcgggcaagaataactattttattcaatctgatagtcaactttatcttctacctacgcaaatggcgaatgctctggctcaagccagaacaatttctggggctactcagcaggttgttattgatacaattcttttttctctgaagaaagaaatagccagagaaatggttgaaactggtactacaaaagcgttaattgatacatcaccttttttctctggagcgacgcatttatcttggcatgcaacagatgctttaatagttccagtgaggacagatcagcaatcgattaattcattaagattacttattgatactctgactaaaccaacatcagaatttagaaagataatgccgtctgatggccatacaccaaaaattcagatggtggttattacccattgcggatggtcaacagtggcaggagcaaggaataaaccaaatcaacagacaaaaatgtacatcgaagctgtaagagaggtaattcgacaaaatattagtaattttacaacagatgatcctaataatcacattgtgattcttgatgattttctgggtagtggcagaatgtcaagtgctaagtctaaaccattagagttgttaaatccaggagatgcaatgactgtgaatagagttaggacatccgtgaatttatctgttaacaaaataaaaaatgaattaaagttcattcacaactccatatggtaaatgacattttatttgaataatctggattgataattattgttacattaattgttattaattctaaataatcctatcgttcttcaggatgagataatttatatttatttgtgttgtgattttttgaatttatttaggtttatgaactgttttagatgaaatgaatcatgaatacgaaattgttgcggtactgataacgaggaaagacctctgcgaggtacgaatccgaaccggccagacggaggtcgctgtcttcacagcttacgaacctgaggagtaagagaccaggcgagggagaaatccctcgccacctctgatgtgtcaggcatcctcaacgcacccgcacttaacccgcttcggcgggttttttattggttgacaaaattatgaatatgcaccaatatcttggttgacaaaagtcgttttttgcacggattaggcggagaagtgtctatgcagaaccatccattcccttgggagttctttcctgagttaacagaggagcgtttaaccattatagctgaggagttgctcaggatacaggatattactcatgagttattgtcatcgccctatgatgataattacactcgtggtggttgtacatttgggcgtcagcggcaggcgttgctacaaatgtgcgtacgaaagacatatgactggttaagactacttaatcctggcatggatcttacgttttcaattgggaatgtccctattcgtttctttactgatgacgcagataaccccaagaaacgcggttttttcaaaagaaatgatgctgatcgactctttgagtcagaggagactactccaactatgcatcgctttgtggttgaaaagcctgaatttgaaggcgagggtggtagagtcatttttaatggctataacgtgtttggtgagatcgtgtcaacttggacatatggtgcggaccgtgttgttatgctgaactctgtcgatgatgtacctccagcaccggtacctatcgaactagaacctatcagtgcgtctaagactgagaaggaaaagaaacaaaatagcaaatagtgggtgaaatgtgtttaacggtactaatttaagacttgctcgtctgtatcacgagctatctctggagcaggttgctgagaaggttgaaaaaacacgccagtatgtacagcgactggagtctggttcagctactccatccccagagcttataaataaattagccgaggttttgcgcgtgaagcccgcctttttcgaagggcaggaacattctcctgttaatgaagagattgtacattttcgtaaacgcgcctcgacaaggatgtcaacgaagctatcaacactcgctaaggctgagttttatcgtcgttttattgatgtatttgaagataaccttaatttgtcacctgttcgatttcctgaatttcgtgtccatacacaagaagatatcgagcgagcggcagaaaaatgtcgtattgagtggggcttaggctttggcccaattgaaaatatgactcgccttgccgagaaacttggggcgtttgttacttcatttgactccgtttcggatgaagtagatgcactgtctgttcctctacgaaggccttttattgttcgaaatacagctaaaaattcaccttgtaggcaacgctttgatattgctcatgaggttgcccatttgattcttcatgaaggaatttctactggggatagattaactgaatcccaggcaaaccgttttgcctctgctctgttgcttcccagaacgtcgatggcgaaatattttccaagacctgtgggggggaggataaattggcagggactaagccaatttaagttgacatggaaagtaagtaaggctgccattgtttacagggctcatcaattaggacttttgactgatgagcagtacagaactgcatttatggggttgaaacggaaaggggaagctattgatgaaaaagaagattatctaatccctcatgagcgtcctgagttattccgtcgggctttatcgtttttatttgaagagttaggatacgacccacagcgtatagctgatgaaatggatatagaagtggacattttttatgagttagtaggagatgatcttcctgcggttcatgaactgccaggaagtggtgatgttgtttcactacaatcttaccgaactcttagaggcaaaattcactaggcataacccgcttcggcgggttttttgttttacgtattctggtttacaatctacaggctagcctgaacaactggcacctgctgcgccagcagagaaaaccgatggcgcacaataccaaacatcacaattctgataccgaccttgccagctggcacgggcggcgttctcatacattcaaatatgactggtaccagcatgccccatgcactgaagaacaggccgaatggctgattcagaactaccgcaggcgtgggtacgactttcagaaagacctcagccctgacttccgacactggataatttctgtcaggctcccttattccgaacgcccaccgcgtccgtcccgcacattccagcaacgcatctggaggtaacgtgcgggtattacttcgacctgttctggtgccggaacttggggtggttatcgttaagccaggtcgtgaatccatgcaggtattccataacggcagagtgctggttgaaccggagccaaaaagcatgcgcggtctgccgtccggggtcgttcctgccgttcgccagccgctggcggaagacaaatctctgctgccatttttcagcgatgagcgggtgattcgtgctgccggcggcgctggtgcactgtctgactggctcctgcgtcatgttaaatcctgccagtggccacacggcgattatcatcacagcgaaaccgttattcaccgttatggtaccggcgcaatggtgttgtgctggcactgcgacaaccagctgcgtgaccagacatccgaatcactcgagcaacttgctcatcaaaacctgtcagcatggatgattgacgtcatacaccatgcaatgaatggcacgcaggagcgggaattatcgctggctgaattatcttggtgggcaaccataaataacgtagcggacgcactaccggagacggtattacgtcgttcgctgggattgcgcgcggaaaaaattcgctcagtataccgcgagagcgacatcgtgccgggagagcagaccgccaccagcatactgaagcagcgcacaaaaaatcttgcgccgctgcctcacgcccaccagcaaaacccgccacaggaaaagacagtggtcagcattgccgttgatccggagtcaccggctcagtatctccagcgccagaaaccacaacgggaagagatgcctgtatacacgcgctgggtaaaaacgcagaaatgcatgacgtgcggtaatcaggcagatgatccgcatcacatcattggtcatggactgggagggatgggaacaaaggctgacgatttgtttgttattccattgtgccgtaaatgtcataacgaactgcacaccggggtaaaagattttgaagaaaaacacggcagccagctgttgttgctgattcgttttttaatgcacgcgagaaattcgggtgtcctgaagtggaaagcataaatgaccgaacgcatagaatttgttttgccttacccgccaacggtgaacacctactggcgacgtcgtggcagcacatattttgtatcaaaagccggtgagcgttatcgccgtgatgtggcgctaattgttcgccagcagcggctgaaattaaacctgtccggacggctggcgataaaggtgattgcagagccaccggataaacgtcgtcgtgacctggacaatatcctgaaagcaccactggatgcgctgacgcatgccggactactcatagacgacgagcagcttgatgaaatcaatattgtgcgcggtcagctcgttcctggtgggcggctggggataaaaatcacagaattggagtgcgcatgaataaccagtatttacagtttgtgcgcgagcagctcattatcgccaccgctgatttgagtggggcaacaaaaggtcagcttgaagcctggcaggagaatgccatgtttgatacagggcgttacaggcgtaaaaaaatccggtaccgcgatgaagtgactggaaaaatgataacgcgggataatccaccaatcccgggaaaacaatcactggcgaaaggctcatcaattgccctggtcagcccggttgagttttcgacatcatcatggcggcgggctgtgctgtctcttgaagagcatcataaagcctggttgttgtggtgttacggcggaaacatttgctgggagcatcagatcgcgataacacagtgggcgtggaacgaatttaatactcaatccggtaccagaaaaattgcagggaaaacgcaggaacgcctgaaaaaattaatctggctggcggcgcaggcagtaaaagcagaactttttggtggggaaggttatgaataccaggagctggcattactggcgggagtgacaactaaaaactggtccaaaacatttactcgtcactgggttgcaatgaaacacattttttaccgactggatagtggggctttattgtttgtaatgagaacgcgttcaaaacaaaaggcggcattttcaaagcaaagtgttgcaaaagtagattgaaaggcatatattttatgcaaatctgatattttgccgattttgtacgtgatggcaaaagcaaacaaaacccgcccaaatgtggttttttttgtgccacttatctcggatagacatggtgaatgcgctggtggaggaagtaagggtgatttttaaccaggtgatttttgaatgcttgcaacattgattttgtaacgttattatcctgcgcccggccctttagctcagtggtgagagcgagcgactcataatcgcttggtcgttggttcaaacccaacaggggccaccatatacaacaaagggttagctaataaatcagctaaccctttttcttttgcctttgaattgggtcaggtaatgggtcaggtaagctttttctccatctgactcagatggctgatagttgccccggataatgcttcgcaatgatgtcatttagccgatcaaccagttccggttttctgaacgtgatgtgcgcggagcccttcttaaagtatctgatgctgaacatctcatcttcatagctctctttaccctgaacagactgaatgtgatcatccagacgaatagtgatgttttcccggttgtcggggatcggtttgccgctgaacagatgcagcattctttccaggtcggcaagtcgatcggcctgttgcccggtgataagatgaaacccccaccggtcccacctcaccaggttgttgacgataattttactgctaaatttgcaggggcaattggttttgtaattccagctcagccctctgaagacgttgatcacccctcgctcaaacacctcatccttattctggtgcagttgttcaaatgtgctcagaatgttcgcttcactgatttccggaaaattatcgtactccagtgaccggtaccatgtatcacgggcctgcgcatccattaatgacagcatcccggaacgttgcatcagatcacgccagagttcgcgatcaagattgtgtgtgatggctttcattgccgtttcaggtttctccatgagccagcagccacagcgaaaatcctgtttcatcgcccagcccagtgcggttttaccgccaatactttctgtcattgctgagatttcagccagttgccggataagtgtgtcgatttgcagcagtgaactctttcgtacagccagaatgtggcggatactggttgagcagataacgtccgtatgcccgttgacaacttccggacgggaggctgtgatatcagacataatcgatattcctttttgcagataaatgaaaacgccagccctgttcaggctggcgtcagtggaatgaagtctggtgagtaagactcaccggttctgttgcagaagctgcagttggcgcagggtatggatatcttccctggcctgttcaatgcagggcagcagtgctgccgaatccattttatcctcatcgttgtcgaagataattccggattcgcagtcgatattgttctgtagccacgcaatcagaatatccagcgccgtttctgtggttaatgattccatactgtgtcttttgtccaggttaccagttgaaggtgggtaaacccggcaggcattcagcgctggcatccaggtgaatgagactgacgccataacgccggatgagtgtgacaaccagacgacggaatgtttttgacaggcccagacgtttaagttgcagaaccgggtatgaccacgcatcggtacgtaacagatatccgctaccggtaaaatgaatccattctgattcgccgaagtcactggtctggtgtgacagcgagtacaaccaggcgttgtctgtttccgtgatatgtgcggtgctgcagcgtataccgctcagggcagcggagggtggcatgctgtcagttgcggtccggtcagattcatcaacaacacgaagggagtagccattgtcgcaggccacgttaatcagttcagcaagattaacaccatcgacgtcaacgacaatgcgccccatgttcagtgcctgcacgttaatgctgtcggcttccagcgtcagggccagtttcattgtttcgcccccggatgtttacccaagataatgttatttaccgttctgtaattgtcgcgggccatcaggccggttgcccggcgggtccggaggatatcaatactgtttattaactgagagcgggtacaggtgctgaaccccggctggtcggttcgtaccagtgcgtatttttccacgagaaagttcaccgcatcgcacagtgaaatgcctgcctcaatatgctgctcaatcacacgttcatcggcaaacggtgtgtcattcagcgtgaggccgtaatgctggtccagcagtcgggtgagcagtatctgccagatggtgacgggagacgggcagcgcgatgcctcccgtacatgcgtgtcgggtaatgttttcatactgaagattttcctgatatgcagagatgaaaaatggaaaagtggcgtggtgaaaacaccaggccggagcagaaggttattctggagagttactttttcgtttcgggcgtcggataaacagccatataaacgtagccacaactgccgagggtgtcggcttcgcaggtcagcccttttgcatacagtgtcacggtatgctgatggcgggggctgagttcaccgctggtgagcatgagctccagttgtttcatcagcagcggaaaggcctggtccaggtggtacgaatccgcgtcgctgaaccggcctctgataccggcgcggtctgcaaggtaatgcaaccggttaccctcctgcaccagacgtgcaccgaaacagggcgtcacggagcagggtagcccccaccaggggcggtcgttgttatcgtcgggatgcgttgtcccggggagtgtgtctgacacgataaaatcctcacagaaaattggttaagaatggtccggtggtggcgataattctgctcttctgaatgcctttccagactcagttcagggtgacgctcatcagccggacatacggaccaaaactgtccttacggcgttcggcaaacacggcaagaacgccgggaatatcctgcacttcacgaccggtatacgcctcagcaccgccgtgccagcggtatttaccggtacagaacggaaaaagacgggatgcaggatgctgacggtgaatacgcatggcttcaccacaggtgatgattttcatgagaatagtcctcctgaatgtgaaagtaagaaacagctgagaaagagaaactgaagtgatatgaaggtgattgtgacggtgacgggttaaagcagaccgtgttccgcaaaggagaaaacctggctgccaccgattatcagatggtccggcacccggatgtcaaccagggccagtgcctgtaccagacgttccgtaataaggcggtcagccttactgggtgtgacttcaccggacggatgattgtgtgccagtaccacggcagcggcattgtggtgcagggcgcgtttaatcacctcccggggatggacttccgtgcggttgatggtgcctgtgaagagggtttcaccggcaatcagctgattctggttgttcagatacagcacccggaactcttcccgctccagtcctgccatgttcagaatcagccattcccgtgccgcatgcgtggaggtgaaggccacaccgggttcatgaagatggcggtccagggttttcagggcccgctgaatgaggctgcgctcaccgggcgtcatctctcctggcagaaaggaaagctgttgcattgttccggcccctttcagtcgatgatgcgcataatggcgctgcattccggatgctgcagggcgtagtcccgcagacggtaataatgaaccgtcatggcataacactccgtacgacaggcgtgatggctgtatgtcatcagacaggctgcaatgccggcggcttccgggctcatttcagcgcggttaccgttcatggcattgaacagtacccatgtttcgtcatcatcgtcatccggttcgggtgccataaatgcccctccgttattcagtgtgtacagattccagataccaccgcagtagtcttcacacagacggtccatccagccgaagatacggggctccagggtcacccactgtgggatgaggccaaaatgctgcggccagaagctgatacgttgttcatcagggacgaggctggcaaccagctgaggctggttattccctgatgcagtggttacggaaacagaaggtgtggttgaattatgcgaaacggttgtcatgagattattccttataaaaagtaaatgaatggaagaatgcctgggggaagggacagacgtgagtcagggctgcactttcagggaaacagcatcagcgcatgctctccagcagcgtttctgccatcacccacaatgcgcgattgagcttaatgtccgtgtcgatgctgtgaatggcacgggtgtggatacgttttcctttagcgctgcgaccggaaatcccgcctttcagcatattttcctggatggtctgataagcactccacaggtccttaccgtaatcctcccggcgtcgtggcgtcagaatgtcggcggtggtgacgggctgatgttcgtcaccataacggtaattcagtgccgcctgtgccagcgcctggcgtgccggtggcggtaagaccagagactgcatggcatcacgcttttcctcaatccggtcaaacacgcccaccacctcgtaagccccttcaatgactctgtccaccacatttccccggtgtggaacactcacttcccccagagactgaccacagacgcagccgttctggcagacgaacctgaagtaacccggcagcatctggtagctggaggtaccgtcatgggagttcagcaggatgatttcagggacatgttgtccgtttatctccccgtcacggcgcagacgcagcatgtgtctggtgtatccccggcggcccgggtcgcgcacgcgggtctggcaggcgaagaatggctgaaaaccttcccgctgcaggttttccagtacggtgatggtgggaatgtacgcatagcgttcactacgggaggtatgccggtcttccccaaaaatactgggtacatagtgcatcagttcttcgtgtgtcagcggacggtcacggcgtatctggtttacatgaccaaaacgacttgctaatcgcatgatttgctccttatgaatgagttagcggtataaatgaaaaagccgcgtctcccggagaagacgcggcctgacagatgaaatgaatgacgtttattgtctgagaagcccttcactggcgagctgcgtatttttatggaaggagatcacccaataaccccatcgggatcgggtaataaccggccagactgtgatcgattcagatgccatttggcagcaaaagggccttcgggcaataaacgtgatgtacaacccggcatatctgttactccctgaaagtaaaaggccccggtcattatgaccggggcctgaaggggagtgacctgattatcagaaagtcacattcagcgtggcctgaccgttataaccttcagcgctgctgccgctgacgctgtgggcataaccggcctgaacgcccagggtgatattttcccggacacgggcttccagtccggcctgcaggtccagtgatgtgccattctgtgagggtgagaacgtcatgttactgccggctgcggctgtacccatgctcatgtccccccgggagctgaaggtgcggataacagaaggctgtacccaccagttcaccggcagttcactcacactgtgttttgcactgtcacgcagggtgtcacgggatgaggtgccttcaccaaagctcatatcgctgtggctgcccagacggaaaccggcacgcacatgttgtgcactgccatgcccgaacttcacataaccggcgttatcctggccgtcatccagggagagtccctgccaggtgtactgcagttgtggctccagcatcaggttgtcagtgatactgaagggcagaccggtttccagtgagcccagccagccccggccccgggcgcggaagtcgttattgtccgatgacgctttcatgctgtggcgggttccctgtgccacaatgtcagcccacaggccggaggagctgtgtaccagattcaggtatccgcccaggctgccggcatcatcccggaccgtgccggcgcgggagccgtcatcatccttaacatcaacggaagaatggcctgcagcaccatatacccccgcggtcacagacataccggcaacctctgttctgagcaggtcaccctccagacggacgaggccatagctgccgctgctttccggcgtggccccacgggcaataccaccgttgttatcgtgcccgagatgaccgccctgaatgctgagacggacgctgttattttcaccgtttacaccggtctgatggctgcgggagcctgccagaatccggtcatagtccattgcctgtgtcaacatggatgtatacagggggacttcagcacgataagcattttcactgcgcaggtaccagtcttcatcgctgtcacggttcagggtgtagttaaaggcgccggcctgaagcgggcgactcagggcaaacgcaccttcttctgtggtggcgccattctgtgcgtccacaacccggataccctgtccggaggttgccaccccgaggttactgtttccgacatttgtaaacgcaagccaggttttgccggttgcctgaccaccattaatcaccagctggtcagaggtattgctgccatcaaggcgaacacgcatattgatggtgccaccctgaccggtgaggttactggttgtcagtttatggaacgttaccggggagtcgccttttgcaacagcacggctcagcgcggcatccggtgttgtctgattatcaaagcgaatctcccctgcgttaacaatatcgccggtactgaccacatcgccattcagtaccatgctggcacctttactgagctgtgttctgccactcagacttcccccggcagccagcatcagtgttccacgatgtccgacagtggtgttgctggcttgtcccccggcattaaccgtaaagctgccgccattttccagcagcaggccgctggcctgaccggatatgccatcaatactgaacttaccgctggcattggtcccctcaacagtggcaccactgtctgcaatcagggcaccaccggatgtaatggtgacatctgttgccttaccaccggcagacactgccagggtaccgccgtcatccaccagggttttccaggctgaatggctctccagtacatccagacgaccgccattttccagaacgacgttatctgccatgccatttcccacggagaaatgccccaggcggtttgtgccggtgacagttgcagcagtactggtaaccagtgcaccgcccgtgttctgggtgactgcagtggcttccccgccggcatgtaccctcagttcaccgttctgatttatggtggtgttaccagcagcgccacctgccttaacaacctgccagcccccctcgttaattaccgtgttcagcgcaagcccgtccttgtgcacatactggtaaccgccattcagtgtggtattcagagcccttccgtgtaccgactggtcaccacctgcgtaaatgagagtgtcacgggctatcccggaagataagataatctgccgtccatttttgttgatggtggtggattctgctgttccctggaccttctgccccgtgtacgagttgtcagaatccgggccgccttctgcgccggtgttgatgatggttcctgttgccagcccgccacttttaacgctctggtaaccgtcgcggttaataattgtaccggtggcaaccccgccttcatgaacccactgctcgcctctgttaatcagcgtggtgttcaccgccagtccgttcaggctctgccccccgccgtcacgaataaccgtatcactggctgttcccccctccagcacgacctgacgaccatttgtggtgacagtggtgtttccggctatcccgccattctgtatccattgcccaccggtgttttcttcactgtccggccccagttccagcccggtactgatggtcattccgttggccgtaccgaggacaatctggttgtcatgatttgtcagtgttccgccgctcacggtttctcccgcctgtacaaccgtgtcagcagccagtgccgggactgatgtgacagcagcaagagacagcgcaatcgccacaccggcgcgttttccccgtgagcgggccagttcggaggccaccaccagggtacccgtaatgtgattccataccagcctgtagctggtgttcagatgtcgtttcatcagcttttccttacagagggtgaataaaaaagccggtacccacaaaagtggataccggcaggtacaaaacagagttatcgggcacagcgatacgccccgggcgtaaacgctctcacccttcatcaggcagagaagtatcagtccgttgtgtgcaattccgttctgcatgatgaagagattcagctgccttttcgcaggccattaaccactataaatgatcgatagtaacgatcgatacctgttttatcgatcgttttattctattaatagcagagcagtcacgcaagagaaacaggaggggtatgaggtgtttgtgtcatgttttcagttggttaacgcaatgtaatcaggcatttcccctggcagactgttcagaagaaaatccagttccatacagcgcgggcaacagagaccaccgtgtcacggacggcccgcagaaccgtgcgtgcaacagaggcaatacagacgctctccgccgtgtcaaatatccggtccaccgcaccggtaaactgttcacgggcctgaccccggacagattccgtgcgcagctcgtcctgcaggcgggtcatcaggggactggcggcatggtcgggaagcgctgtcatgagcgcactgaccagcgtatccagttcccagccggtgcgggccgatacggcaacaaccggatgtacgggccggaacagacggaataccgcctccgttttttcgcgaatattctgtgcctgtgcgggagaaggctgaatagcggccatatcccattcatggcagggctccgttttgtcggcctgcgtcaccacaaacagcacctgctgatgtccgcactgcaggatgtgtcgccagaaatactcatccacagacagggcacggtcatcggctttaatcagccacagtaccaggtccagttctggcagaatgtctcggtacagggtttcatactctgcatccctgtcccggctctcgcccaccccgggcaggtcagtgataatcatgctgtgaccgtgaccactcagacggaagcgctgcacttcccgggtgccggcgtgaacatcactgaccggggtgacctccccctgaaacagtgcattacagagtgaggatttaccggccccgcttttacccataatgccaataacgggttcgtgactggtgagtttgcgcagatgttccaggatgtgacgggaaagtgagtaaggcagggaggagagcggtttttcaattgcctcaatggcatcagacggattcataaatgtattcccggtgaaaaaagacaaaaccccgcgcaccggaaagatggcgggggattcacaacgataatatctgtctgaaattatttaggatgcaggtatcttcagataatcgcacctccagaattttattcttaatagttgaatagtggtatttggtttccctgagagaatataaaggtgaatcatgctgtattgagtttgattctatttgtactgagacaggtatcttcatgattataatcaaaagtcgggtggattggtctggcgctaattattttctcgaataaactcactaattattgtaaccatcccaaaggagatgattttatgtataattgtggtgaatcatattcagaatacgacatatcattatctgacgatgaaaactataacgatgactattatcgtgagcgcccgtgcccgggagaagttttcggctatgataatactgaggataatgatgaggcggcatcagattatgcattaaaaataaatgaaaactctgattaatacgggggtagctgataataagacaatcaatgacaaatattaatgaataaacataatcaggcgctcaatacttgatttaatctgggcgcctgattaaaatccgatgtaacatataataattttcatcaaaatagtatttatgtactaactaagctggatttgaaactctatttctgggcatttgttatcacttaatccattactgatcctccttcagcatatgtcgtatccgttgaaggatttacgcatatcggtaacgtcggcaacgagccagatacgagtatctaatgggagtgaaatcatcttcccctcccgctcagttcacggatcaacaccgtgagcagctctggtgaaggattttccagcgccattttaccgtaatggaattccacatagcaggaagccgcacaagcaactgataatgcctccggagcaggatcagctgtagcacagcgtgggggggtcgaaaaattcggagaggccggaaaagattgtggtactgtagggtctacaatagttgggggcattctacgagaaatacggccttctctctgccagaggcgtagccatttaaaaataagattgttatcaacgccatgttcccgggtcagttgtgcaacattagcatttggtctcgaagccagttcaaccatatgaagtttaaattcattagaaaatatccggcgagtcccggagcgccagtctgtaggtttatccatcaatagaactccgtctaatttagaaggagctctaacttagtctgcaaggagcaggtgttacagacgacacaggctttacgctgatatgactttccgtgtcaaaccggaatctctaattttgacgattttctttttaggtttaattcactgagggcgacgtagcagtaggttgttgtgcagcagacattgctatccggcccatatcccagataaaacccgacagctcacgtgcaacagcaacaattctaatattgatattctttccttttgcctgaagttttcgatacctcttgcaaagtctgagctgagcatcccatgctctgccaataacagggcggggtaaattttcctgccttttttgtattaccggaccgatgcgtgccggataccggtaactccacgcagcctcgaccaatagctttctggcatagctatttccggctttggtaatgctgccctagtgtctgcttccacccgatgaatattctgatggcgtgataccaaacatttaagtgcataaaagtttgtatatttgttggactttatctcaaagctaaaaatttcaacataaatacataaaagggttttgtgaaacaagaatctgaggctgaatctgctacagagctgggttctattctgttaaacttgcggtcaaaattttccaagtaaaccataggatatggcatgagttcactgcacaccagtagcagcagagcaataacatgaacatgccaatggagagctgtacgcaaatgaacgccgtagaaattgaacaagccatcactgatcttgcagagcaaccttttgatcctatagagtttccttatgctttccttgaagcctttggtaacaaagaaacgactatcaaacgcttgcgcaccggagcaacgaacaagtccgatttaggtggcgttcttcagaccaataacattcacattttggctagtaaagaagggcaagtaacacaaatgctggcttcactcaaggccagcccggcaacaggcaaggccaaggccaaattcatcctcgccacagacggaaaagacttcgaagctgaagatctcatcagcggtcagactgtcgcttgcgcctttaaagacttccccgatcacttcggctttttcctgccattggcgggtattagtacagttcgtcagatcagtgagaacgcttttgacattcgggctaccagtcgcctgaaccgtctatatgtcgagttattgaaagataaccctacttggggtacggcagagcgccgtcatgacatgaacaaattcatgactcggctgattttctgtttcttcgctgaggatactgacatcttcgtgggcaaggggcgctttactgaaaccgttgcgcagatgagcaccagagattcatcgaatacgcatgaagttatcgctactttgttccgtacaatgaatactagcaacaaagatagagctgccgctggaatcccgcgttgggccaatgaatttccttatgtcaacggacgcttgttctctggaagtaatgatgtaccacggtttagtaagattgcacggtcttatttgctccacgtgggtagccttgactggaccaagataaatccggatatctttggctccatgattcaggcaattgccgaagatgaagagcgcggagagctgggtatgcattacaccagcgtacccaacatcttaaaagttttgaatccactatttcttgacgacctgcgtgcacagctggacgaggctggtgacaatccacgtatgttgctgaacctgcgcaaacgcatttcccacattcgtgtgttcgacccagcgtgcggttctgggaactttttggttatcgcgtataaggaaatgcgtgccattgaggccgaaatcaacaagaggcgcagtgagccggatcgtgcctcggatattccacttaccaactttcgcgggattgaactacgagatttcccggcagaaatcgcccgccttgcgcttgttatcgctgagtaccaatgtgatgtgctgtaccgtgggctgcggctggccttggctgagcttcttcctttacgcaacgaaaattggattacttgtggcaatgcactgcggctcgactggttaagaatttgtccgccaacgggaaccagtgtgaaattacatggtgacgacttgtttggatcaccgcttgatcaggcagagattgactttgaaaatgaaggaggagagacatatatttgtggaaatcctccatacaagggtagccaaacccaaactgatgaccaaaaaaatgatctaaaagccatattcgagaaacgcacaactaattggaagtcattggattatgttgcaggttggtttatgaaggctgtcgactacggtagtcaaactaactcgtctgctgcgttcgtctcaactaattccatttgtcaaggtagacaggtcgaaaccctttggtcgttgatttttgcagccaagcatgaaatatcctttgcttatacgtccttcaaatgggcaaatcttgctagccacaatgcgggagtgagtgtcattgttgtgggaatttctaatcatgttaagggaccccggaaaatattttccacaactgaggatttggggaccatcataaaagaagtagacaacatcaatgcgtatcttgtcgcgggtaaaagcacaattgttgcacagcgaagttttcctttatccgaagtaagtgtaatggattttggttcaatggcgaacgatggtggtggccttctttttgacagttcagaatcaagtcgtgcagttaatgattatggtgctgatatttgttattttcgaaaggcttggggagctaaggagtttatttctggaactcctagagcttgcctgtggttaaataaagacagtgctaaaaaagcaattctgaactcttggatttcagaccgaattgagatcacacgtaaggccagagcaaatagtcctcgggcagcgacaaaaaaactagcagatattgcttacagatttggtgaagtgaggcaagacggcagcgagcgaatcattattgttcccagtgtcagttctgaacgtagggagtatcttccatgtggttatctcgatgttggttcaatcgttatcgctccgaatcttgctttctatgattccccgctttggaatatggcgcttattgcttctaggttgcatttggtatgggtggcgacagtctgcgggcgtatcaaaactgactatcgctactctaatacccttggctggaatactttccctgtcccaccactcactgagaaaaacaaggccgaccttacgcgttgcgcagaggatatcctactggcgcgggaacaccacttccctgcgactattgcggatttgtatgatcccgcgaacatgccccctgacctgcgtgctgcccatgaacgaaacgacgaagtgctggaacgcatctatatagggcgacgattcaagaacgacactgagcggctggaaaagttgttcgacctctacacgaaaatgattgcttcgactgcaccggtcaaaggtaagaagcgcaaagcaggaaataacgaatgaacaataaaatcaagaatgtaccttccgtttccgttacttatgcacgtaatggcgcatcaaccaaagctaatgtgcttgggatgcgtcctatgcaggagagagcttatgaaaagcgcggcgagcagtacttgcttatcaaatcaccaccggcatcaggtaaaagccgcgcactgatgttcatagcactcgacaaactcgaaaaccaagggattaaacaggcaatcatcgttgtgccggaaaaatctatcggcgcgagtttcaacgatgaaccgctatcgcagtttggattctgggctgattggcatgtcgaacctaagtggaacctatgcaacgcgcccggtaacgacaacgggggcaaggtaagatcttttggctcttttcttgaaagtagcgacaaggtgcttgtttgcacacacgcaacctttcgcttcgcggtcgatgcctatggcgtagaagcgtttgacgatcgcctgatcgccgtcgatgaattccaccatgtgtcagctaacccggataacaagcttggtcagcatctggggcagttcatcgcgcgtgacaagacacacatcgttgccatgaccggctcctacttccgtggtgatgcggaggccgttttggctcctcaggatgagtccaggttcgataccgtcacctatacctactacgaacaactcaacggttacgaatacctcaagcaactcgatatcggctacttcttttacagtggctcctacgtcgatgacatccttaatgtcctcgatcctgacaaaaagaccattatccatatacccaacgtcaattcgcgcgagagcacgaaggataaaatcaaggaagtggagcatattcttagcgagcttggcgattggcaaggtgcggatcctgcgacaggtttccagctagtcaaatgcctcgatggccgaatgttgcgtatagctgatctggtggacccaactagtcaaggcaagattcaggaaagccttcgtgctgcagaaatgaagacagaccgtgactatgtagacatcattattgcacttggtatggcgaaggaaggttttgactggatttggtgcgaacatgcgctgaccgttggctaccgtgccagcctgactgagatcgtgcagattatcggtcgcgctactcgcgacgcgccgggtaaaaaccgcgcaaggtttactaacctgatcgccgagccggatgctgttgagggggctgtcaccgaggcagtcaacgataccttgaaagccatcgcggcaagcctgctgatggagcaagtattagctccgcgcttcgagttcaagcctaagaacccagaaagtggtccggccccaggctttgattatggtgatggtggatatgacccggatagctgtaattttggtgttaatgagcagacagggacgtatcaaatcgagattaagggacttgccgagcccaggagcaaagaggcggcacgcatctgccaggaagatttaaacgaagtgatcgcggcctttgtgcaggataagcccgccatcgaacgaggcctgttcgatgaagagctgattcctgaagagttaactcaggttcgtatgggtaagatcatcaaagaaaagtatcctgagcttgatgctgaagatcaggaggctgtacgtcagcatgctatcgccgcccttaacctcacgcagcaggccaagcgtcttgccaccgacgataacgatgggacgctcaatactgctcttattgacggagtgcgtcgctttgcgatggatgtgcgcgatttagacatagaccttatcgaccgcatcaatccctttggtgaagcctacgctatccttgctaagacgatgagtgaagacagtttgaagcaggtcgcggcggcaatctcggccaagcgtacctcgatcacacctgaagatgccaaggtgatcgccaagcgtgccgctgaattcaaacgtgaacgtggccgcctcccatcgttaacttcgccggatgcttgggaaaaacaccttgctgaaggtgctgctgcgtttatgcgttttagggcggagggacgttatgaataattctgatttagacgatttggcagcagaacttgccgagtttgcaccacctgagaagaaaaaaggacgtccagccagcgaggaacgcatcatagccggttttgaagagatccagcgctttactgagcaacatgggcgtgtcccgcaacatggcgaagagcgtgatatcttcgagcgtctctatgcagtgcggctcgaccgcctacgcagtctcccagactgccgtgccttgctagagccactggatcatcagggcttattagctggagggggcgatgtagcggagtctgcggacgaaattatcgatatcgataacttggctgccgaactggcggatgtttccagcgaggacgatatcacggtcttgcgtcatgttcgtgctagcaccgaaaagcgcgttgtacaaggagttgcggatcgcaagccgtgcgaggattttgatgcgttcaaaccactatttgagcaggtacgcaatgatctaagttcagggttaagagtgacccgaccttttgggcagtatgcaacgattgaagtgggtcattggtttatcctggatggtcaaacggcttatgtgtctgaggaaggtgaagagttcgattctccacaggggaagaaagatgctcggctgcgtgtcatttattcgaatggtacagaaagcaacctacttcggctgtcattggttcgtgctttgtataaagacgaaacagcgcgtcgaattaccgatccagacatggggcctttattcagcgatgctctagaagagagcgatctagaaagtggcactatttatgtgttgcgttcgctatctgataacccttatgtagctgaacatcgtgatgtcattcacaagattggagtgactggcggcaaagtagagacgcgtattgccaatgcggaacacgattccacctatctgttagcgaaggtcgaggtggtagcttcatacaagcttgcaggcatcaaccgcacccggatggaaaacctgtttcacaggttgtttgcacccgcaaggcttaacattaccattaacgaccgtttcggccatccagtgcagcccgaggaatggtttctcgttccgttattcgttatcgatgaggctgttgcacgtattaaggatggtagcatcattgggtatgtttatgaccccatgtctgcgaaactggtgaaggcatagtgaagtgacacactgaatttggccacctgttctgaggtgatatactcacctcagaacagcacaggaataaaagatactgatttgaatgtgcctatactttgtgatgtgaggatcaatgaatagtaacctgatcaagatatgttaccgtggtgagactggtgaaagtgatctaagaacattgatacttggtgagattctatatatctcactatgaagtggtcaacaaaaactggccaccgagttagagtttttccagtatcgattttccgattcgtttgggggtaacccaccgttatattcgtgcggtcttagtgcgctataatatccgacgatatagtccggcgtgagctgcctcgctgaagcttacgtaacccaccaccggcatccattcgttcttcagactcctgaagaagcgttccattgagctgttatcccagcagtttccgcgccggctcatactctgcctgatctggtatcgccacaataactgctggaactgcctgctcgtataatgactgccctgtcgctgtggaacatcaccccaccgggcttaccacgggtttcctatgccatttccagcgctttcatggtgagcctgctgtccggcgagaacgacatggcccagcccactggttttctgtaagcgtcgtctgagtaccgtctggtcccgaatccaggatcctgtaacttaagcacccacttattttgcaggtggacacctcatgcgcaccaaagaacgactcccccggaaacgctattctcctgaatttaaaatggaactggtcaggctggcccttgaacaagatgtcacgaacggtgcaaatagtggttcttccgcaacttgggtggaagaaaatggatgaaactttctggtgaacaaggatctaagctgttttaagttatgggcaacgcaatgcactctcttaagacacttctacagttaccttgcggatggcgatgcagtcgacaaattattagctctgacggtatcaccctccatctccacggaaaacgcaaaacagcacaatgtcctgaatgctctaagcgtagcgactctgttcatagttctcgtcggcgccggatacagcatctaccctgctccgggcagacgctatggcttgtattttccgtccgccactggtactgccgtaaccctgtttgttcacgaaaaatttttgccgagtcgcttgctcccttcgccggttcacaccagcagtcttcacaggcgttacaaaatttacaacgtcaactgggattaatagccggaggtgaggctggaaaacgggctgcaacggcagtgggtctccgttgcagtgcagatactcttcttcgcagggttatcaataccccggggacgaaacagtcaggcgcgcctcatgtcggtattgatgagtgggcgtggcatcggggccaccgttacggtacgttaatcgtcaatcttgatactcaccgtcccctcgtcctgcttcccggtcgtgatcagcgtacgctggcgacctagttcagaaaatatccggaaatacaggttgtctcgcgtgatcgcagtggagtctatgcaacagcagcacgtgaaggtgcacctcaggccagacaggtggccgatcgatggcacctgctaaaaaatattggcgatgcgcttgaacgaatgatgtacagacatatacctctgatacgtcttgttgccagtgagttgtcaccaaagaaatcacctgagccagaactgtctgtgcctgcagcatcgctccgtcgtccggaacgccttaaacagcaaacccgcaaaaaacggcatcagcgttggacagaggttatggccctgcataacaagggatgtagtttcagggaaatatcccgtattacaggcctgtcgcgtgtgacagtcagtcgctgggtgcgttcaggaacattccctgaaatgtcaacccgacctccaaagcgagggcttctggacccatggagggagtggttaaaagagcaacgagaaagcggtaattataacgccagccggatatggcgggaaatggtggcccgggggtttacaggcagtgaaaccatcgtcagggatgctgttgccaaatggcgtaaaggctggatcccaccggttactactgccgccagacttccttcagtgtcccgggtaagccggtggttgatgtcacgaacggtgcaatagtgatccacacccaacgcctgaaatcagatccagggggtaatctgctctcctgattcaggagagcttatggtcacttttgagacagttatggaaattaaaatcctgcacaagcagggaatgagtagccgggcgattgccagagaactggggatctcccgcaatacggttaaacgttatttacaggcaaaatctgagccgccaaaatatacgccgcgacctgctgttgcttcactcctggatgaataccgggattatattcgtcaacgcatcgccgatgctcatccttacaaaatcccggcaacggtaatcgctcgcgagatcagagaccagggatatcgtggcggaatgaccattctcagggcattcattcgttctctctcggttcctcaggagcaggagcctgccgttcggttcgaaactgaacccggacgacagatgcaggttgactggggcactatgcgtaatggtcgctcaccgcttcacgtgttcgttgctgttctcggatacagccgaatgctgtacatcgaattcactgacaatatgcgttatgacacgctggagacctgccatcgtaatgcgttccgcttctttggtggtgtgccgcgcgaagtgttgtatgacaatatgaaaactgtggttctgcaacgtgacgcatatcagaccggtcagcaccggttccatccttcgctgtggcagttcggcaaggagatgggcttctctccccgactgtgtcgccccttcagggcacagactaaaggtaaggtggaacggatggtgcagtacacccgtaacagtttttacatcccactaatgactcgccttcgcccgatggggatcactgtcgatgttgaaacagccaaccgccacggtctgcgctggctgcatgatgtcgctaaccaacgaaagcatgaaacaatccaggcccgtccctgcgatcgctggctcgaagagcagcagtccatgctggcactgcctccggagaaaaaagagtatgacgtgcatcctggtgaaaatcaggtgaacttcgacaaatcccccctgcatcatccactctccatctacgactcattctgcagaggagtggcgtgatgatggaactgcaacatcaacgactgatggcgctcgtcgggcagttgcaactggaaagccttataagcgcagcgcctgcgctgtcacaacaggcagtagaccaggaatggagttatatggacttcctggagcatctgcttcatgaagaaaaactggcacgtcatcaacgtaaacaggcgatgtatacccgaatggcagccttcccggcggtgaaaacgttcgaagagtatgacttcacattcgccaccggagcaccgcagaagcaactccagtcgttacgctcactcagcttcatagaacgtaatgaaaatatcgtattactggggccatcaggtgtggggaaaacccatctggcaatagcgatgggctatgaagcagtccgtgcaggtatcaaagttcgcttcacaacagcagcagatctgttacttcagttatccacggcgcaacgtcaggggcgttataaaacgacgcttcagcgtggagtaatggccccccgcctgctcatcattgatgaaataggctatctgccgttcagtcaggaagaagcaaaactgttcttccaggtcatcgctaaacgttacgaaaagagcgcaatgatcctgacatccaatctgccgttcgggcagtgggatcaaacgttcgccggtgatgcagcactgacctcagcgatgctggaccgtatcttacaccactcacatgtcgttcaaatcaaaggagaaagctatcgactcagacagaaacgaaaggccggggttatagcagaagctaatcctgagtaaaaacggttgatcaatattgggccgttggtggagatataagtggatcacttttcatccgtcgttgacacatacatccgtccatgccagttttgtaactgagtcagggccaggagtcgtcaatcagcaccgatttacttgagacgcttattgtctcggatgcacgttcatttgctcaggatcctcgattttgtcttagcgtcatggccgagatagcctgccgggccctttcccctgcagtgaacgatcctggaaccgccattgatgtcattggcagaggtgttcgtatactttccacttacacgcagaataaatctgatgaaatagaagtgaaatatccttcagtacatgttgcaccacttcagaataacgatctactggaagacttttctcacctgtcgcgcgcaatggtgccagtatgagggagattcagataagagtccttaaaggactgtcgatgctgagtaagggttggcctgggatatttgctgaagccgcacataccctggcatttgaaacattagagcatgcaactcgtgctgaccatatagattctgatagatatctaataaaatcaatttattataatttatttagtggcgaagattctaataaaaaaccatagctgcagagcaagcgattcggttgttggcaagtcaagggcaaagcattcgcgtgagaatgggcgtatgctttgtgccaaaagcaaacgttgctaattctgcactgttcagcgatggtgcagtagcgacaggcactgccactgtccagtcggcaaaagcgaacactttgccactgcggggataagctgattgaagctctcgcgcaaaatcacttattcttttgcgttaataaaatgtaggagatgagtcatgacaggcgaaaatcgtggccggggaaggccgcgaaagacagaaagtacctatgcagatactcgtaatgatctgatccgcagcggccttgaactgctgacgcagaatggttttcttgcgacgggagtcgatgccattgttaaaaatgccaatgtccctaaaggctcattttattactactttaagagtaaagaggattatgctcagaccgttctgaacgcctatgacagtttcttcgagcataaactcaaaaaacatctacatgaatcatcctgcacaccaatggtacgtctggaaaatttcatcaatgatgcctgtgaggggattaaaaaatacaattttacccgcggctgcctggttggaaatatgatgcaggagagtccggggcttccccaatccttcattaaagtactacagaatattcttgagagctggcaggcacttgttgcggcttgcctgtccgacgcgttatcttcaggcgaaataagttcaaatatgaataatacacaactggcggctattttctggagtggctgggaaggtgcggtaatgcgttctaaactatattgttctactgagccagtgtacgacttctggagctatttcaaaacctcggtacgctatcagtcttctcaggaagcaacaactggccagtaaaaggggccgcagccccctttattcaatttgttcaggttgattgggcttttcaatgagaaaatcttctggggtttaaccttcattaagtcgtttttgtaaagtaagtggcattttaccattacgagaccacgtcttgatttctctgttctcatcctcaaagatatatttcgcttttttctcaccatctttgttttttcgtctgttttttattgtatctgtcataacttaaattggcccctgctattctgccgggacaagtcccaaagaaatgatatagtcagccacttgttggcacttagtttccaatttcttacatttagccgtttctcgttttggcatcttcacgacgttccttaattaccgtgtccagtttttctgcatgtcgagtaactgttcaaaattaactccgcgtacatacatgcgtagtgaacgaatattcatcattgtccgactgatgatgctgttgtaatgcaaacctctcgtattttcttggtcacaacactttcgtaccgctgtgatgactttccaaacacggacattacaatttttatggatacgataagaaattcttatcaagcatgaccgattttgtcgattgatttgataaaaacattttgtttatcctatcttttgcatggttttaaaataggcaaacccatttatcgttcgggaaaagtgatagtggagatcattgaaatgaaaaagattatggcggtttcagcgcttgctgtagcaggtatgttttcagcccaggcactggctgatgggagcaaaacaggcttttatgtgaccggaaaagcaggtacttccgtggtatcactttcagatcagcgatttatcgatggtgaaggggagtgggcggacagatacaaaggcggcgatgaccatgacacagtattcagtggcggtatcgcggctggttatgacttttacccacagttcagtatcccggttcgtacggaactggagttttatgctcgtggaaaagctgacacaaaatacaatctttataaagatgactggtcgcatgatgatctgaagagtgaggtgtcagtcaacactctgatgctgaatgcgtactatgacttccggaacgacagcgcattcacaccatgggtatccgcagggattggctacgccagaattcatcagaaaacaactggtatcagtacttgggattacgggtacgggtacagtgggcgtgagtcgttgtcacactcagactctgctgacaactttgcatggagccttggggctggtgtccgttatgacgtaaccccggatatcgctcttgacctcagctatcgttatattgatgcaggtgacagcagtgtgagttacaaggatgagtggggcgataaatataaatcagaggttgatgttaaaagtcatgacatcatgcttggtgtgacttataacttctgacgaaactgctcctgaaagataataattacttatcttctgtaattaaaaggaaacaccctgcagtaattatgctgcagggttgtctgttatatgttttataggatatttttgatttttattgtcttattctctttataataagattaccgatatattccgatgagtatcagaaaaccattttgttcgggaagcaaaccccgggttttattgtttttattcttcctgggtggatttgcccctatatttccagacacctgttatcacttaacccattactggcccgctgccgcagatattcccgtggcgagcgataacccagcgcactatgcggatgccattcgttataatgctcgaacgcctctgcaaggttctttgctgccgttaacccgtctggtttgggcatgatactgatgtagtcacgctttatcgttttcacgaagctctctgctatgccgttactctccggactccgcaccgccgtgttcttcggttcaagtcccaacatccgggcgaactggcgtgtttcattagcccggtagcatgaaccattatccgtcagccactccactggagatgtcggaagctcgctgccgaagcggcgttccaccgctcccagcatgacgtcctgtactgtttcactgtcgaagccgcccgtagtgaccgcccagtgcagtgcctcacggtcacagcagtccagcgcgaacgtgactcgcagtttttctccgttatcacagcggaactcgaacccgtcagagcaccatcgttgattgctttctttcacggccactttgccagtatgtgcccgtttcgatggcggtacagcggtttttcgctcaagcaacagcgcattctggcgcatgatccggtaaacacgtttggcattgatcgcaggcataccatcaagttcggcctgtctgcgaagcagcgcccatacccgacgataaccatacgtgggcagctctccgataacatggtgtatacggagaagcacatccgtatcatctgagtgacggctgcggcgaccatctttccagtcatcggttcgtctgagaatgacgtgcaactgcgcacgcgacacccggagacaacggctgactaagcttactccccatccccgggcaataagggcgcgtgcgctatccacttttttgcacgcccatattcaacggcttctttaaggagttcattttccatcgtttttttgccgagcaggcgctggagttctttaatctgcttcatggcagcagcaagttcagaggcaggaacgacctgctctcctgcggccacagcagtaagacttccctcctggtattgcttgcgccagagaaataactggctggctgccacaccgtgttgccgggcaacaagggagaccgtcattcccggttcaaagctctgctgaacaatagcgatcttttcctgtgtagtacgccgtctgcgtttctccggtcctaagacatcaatcatctgctctccaatgactagtctaaaaactagtattaagactatcacttatttaagtgatattggttgtctggagattcagggggccagtctacccggctccatagtctgttgaataattgcgattttttcctgaggtgttttacgtttacgcacctcttttcctaacaaaacgccagccatctcaaaattagaactagtgttagacatatatccaagcctatctcttattttaagatacatctactgtctggtatttcagggggccagctcaatcactgccgaaaaacacattgattgcccctcaataatcctgccgtcaacgtcaaaattgctggtcgggttcgacttatttaattgtgtaaacagggcctctcagcgaaaggcccttatgcatcacctgatgttaaaagtcactacacccaagatgacgttcaatggcaccatgcgattcaatgtaagcctgggccgtctgttccagtacaccaggctcagcgttatatgtgttagctgcatcaaataccaacgacagcacttcaggatacacaaccagatgtgtaactgagttatcttcgtccaatacttttccccacgcctgctcaatcagatttctgagaaccaccacctcacgactcttacaccagacatcgttattaagtagcagtaccataagataaggagtggtatcgttagccacagcttccctactccagagataatataaaggggcgggctcaacagatttatctttacgtcgcttgcactgcaaatattcagaaattagtctatgcagttcaccagtaaaatcagccatcagagagggaattgccttattcatacctgggcaaggtattaatttaaattgtaataatttaattttaggatgtgtagctgcagcccgatacagagttgcaaggacacacttttgccagaggacgttacaggaaagcttaatgtttgattctgtatacataataaatcaccttacagttacaataggtcaaaaaccgctgtagccaaagttacgctgacctgatgctttagtgtcgagcttcgtcagataatccagacgtgccaataagcgctgatactgctcagggaaatcaggatcgttaatatccaggatgtaacgtccattaacagggaaatgaactagtccctggtgatcttccagttctaaccctaaggcactgtaccaggctccggtaattaaccctctcagggtgtcagagcgctcatagtctcccaggtggtaataggcgtctttgttaaaaaaaaggcagacgtgataatgacatttaaaggactgcgtatattctttcgcccagataatacaaaccgacgttgcgtaggtgcgtttgccttgttgttttttacggtgttgatctgcattaattttcgcattcagcgagttacggaaacgagatatctctccgggactcaggttaggaaaacaggtaatggtatccccgttgtcaatcacgggaggataatggagatccacccgtattgccgttattctgggatgtttctggaagaggttattcacctggtttcttatttttaacccgtgagcctcatgacattcaccgtaaagagtttcaatcgtaatcatgttaatattccttttgctttcagggataagctaatagttaacctacccaatacacaacagaagcagatattaatattcgtatcagtagttcccagagggatatataaccctctgggcgtcaattaagaaaaacgctactgcctattgttacattagagaacaggatgatgttacacagtcacattagaacgtactaaaacattaaacagagttatgatctacacacaactaattatttggtatcagaataccattagctctattagtacatcatatccatcattacacatataccagatactatacatcacagatacaatatatattacctatccaacacacatgtatttataactccaatgccaatagctacaaggactataaaatattactctgcagttagatcaacaatacctttatcccagtgtctttttacagtggataaactgatgcttaattttctggctgtttgtgactgactgaacccctgcaatttcaactgtctgatatttttactatgaatactcccttctttccttcctggttttcttttaattttccggatactgatgtcgggaatttttcctctaatatctgtaggtaaaatcatcccggtgagtaccacaggaatatcatcaccatccggcaactctgatgacataaaaaagcaaatattaataccttgtctgatacttaaagataaaacctcctgtattttttccggcgtattaccaaaacaagttaacgatttagtaatcagaatatcacccctttgcatatcctgcgtcaggagtcgaactaaccgttttctgtctgccagagtataatccgggcgacccaattcgcctgttaactgcaatagtggttctttaaaatatctctgaatcatggattttaagcgattaagttttgaccatttttcagagtctatgtatgcaacactcgccataatgcctcaaactggtgtcatgaattaattattgaacctgttttttcctgagtcgcattactcttttctaagggagactctccagatacatcggaaaagtactcgataaaagagttggccactcccgggtaatgattgctctctttaacctcagaaagcggtttctgttcatcatttacaccacgatttctgggttatgaataaatctacgcgggccataatcattcatcttcaaatgggttaataataataacatctccacctgttctggaactttgtgaaacttcctctgttctcagaacaggcactattacagccttattattgatataaaaaatcggaatatgaaaagtacaaaatcctgtactacgaatctgatgtcgcctcactgtttctttcgtaccatactcaatcaactcatctatcggcaggcaaactgaattgcaaaagtcaaaaaaataatccccaaaaacactggttttaatcagaatggttttataaaaccctcctgcacgattcagggtatgggaaacttttctgttcgtgtaaatacaaattgccttctcaactttataatattccagcattaaggtcgcattctctttaattccctttctctctgcaactcccatagcatttctggtgctttcatgaggaaatatctttctatcgagaacatcatattcatatttgatatgcgatttataaatgctatgaaaaaactctccttttgttatttcaggctttgtccgttgcacaaatggttcctcattaaaaaactgacgtagcttatcctctatatcagttatagcagtaatattttcatttatcctgtttaaaacaggagcccctagctttaaacactctttaatcgctgctgaaaatgagcatttttttaaatactgatactttttaattacatcagcttcatatgtttctgcaagagagaaagagacacgtttcatcatgaaactcctttttaattataaaattaaaatatagaaatatatattattctgatactataaggttaatactgactaatccaccacaatagatcacttaataaccatccacaggatttctttccaatagttttacgtggcgggaattttccttcacgttccagtttccaggcttgtgaacgagaaatagacgtaatgttctgacgttcctcttctcgtaccagtctgtcacaggtgtatccatagatcttcaaaattgataaacggttctcatctcttaacggcttccacatattgctctccttatacattcatgattttcagattgtatatgcatgtgagctgctcaaatcactacatctatctgtagtggtatgctgctgaacagcaccagcaactcacgagcaaaacaatacatttgcacaaccaagaaatcaaattgcgagaattgatttaattaactgacttatgataacacaataacaacaaagaaagtcacaatataaaaataattcaaacaatactttttaatatacaaattaaaaaccaaaatcataatcttcgtaggttattttatgcagacaataacaaaaaaaatcttgttatgatctatgatatcaagaggaggggtagtgaccaaaaattttccccagaaaagcccccacaacattagtttgaaaacgtgacgaagttcacaaaatcatcttctggcgataatagaacttgtaagagggagttgatttttgccaacttgctaaagctaaagtgcagacaaaagataataattgaatgaaaacgatacatattttcagatgaaagtgacgtgactgtagagggctataaccgtaaaatcatttacgtcctgagcaatatgcaacaaaagggaatgctcgtaaaaaaatcaggaataaacgctaaggatatcgtattagattcagcatcgtagccactgcataactgattcccatttcgtagaggctgttaactctgtatcaatgtcctgacaaaggactgtatcaagtttctctacaggaaacagctatgcaatagacggaagaatttaacattatggtaactaaaaaggtaaaaacaaaccacccgtactatcgtgttttatctggcacctccatgccgtttccccacatacatgaagctgtttccgaacagttgcttctactcattttcaaagcacgcagattgtatctggatccagaatatcgtccctggtttgatgaacaacatcggattctctcggcattacgcgctaacacaaaactacaaaatattttagagcaaaatagagaggactactccataggtgagaccgataatccactatctaaagagctgtatgctgcttttcaggttatgtgccatttatacaatggttttgataacagactcgtcagcctgaaaacctggggagatatgaacagggaaccaacagcaaaatttgtcggccaaaatagtggtggctggaaaacacctgagatggaagaattcgtcagaaacgatttgttcaatattctgacagattgtaaagctcattgctcaccacttcccgctctggttcgacaaggatattgccatcaggatctttctgttgcgcactcatgtactaaagaattactggaacaactgaaccgataccatcaaattgatgaatcagcgatacttgccagaacccttggtttggctattaacaactgctatcactcaaaaacagagattcctgaatggctttctccttttgaaaatgaatacaaaagtccctggaattgtgagaaaccagatactaacgatgtgagtaaacttagaaaacaattgctaacaatcgggcgtacagaattcgtggacaaaatgttttcgctagccaacaaaaatgcaacaaagataatatatgatggatacgttaaactttatgctctggaaatatatgaatggttaaataaattagtgcaatattttaaaggaaatgattttattcgttacacctggaaattcacaacaattatttccgatgaaagtgacacgattgaaaacaccaccgcatgggaaaaagactattgtcaaatcactatacagcgcgatgaacttctgaaactgatttataccaataccctgcaggatgcagcaatgaatcttgctggttgcctgcaacaggcatacatagaaccgttaaaaagggaaataaattatccaggaataaacattgatgcaaaagagcgtgaaattagaaaatctattgaattcaggagcgaactgaataacttcacaaacatcatgaaacaactggaaacatttgaaaaatggtataacgccaataaaattctgttggtaagtaacaaaaagaaacgtacagaaaagattgacgtgaatattcgtcttgcaggactgaaaggctatgatctgaatgaaggtatacctgatggtcagggacgcaaaattaaagatggtgtgaatgaactcgtcaaggcagatggcagtctacaacttccacaagatatcagtgacacttcgcttaaccgttaccgtcaagcagttcaacacattattaaggatgagatcgacacgttgctgatagcacagagggaaaaaaataaaataaatccatatagcgaagatagatactcgatacgacctttatggggaaaatgtctggtcgaacagtaactcactgagaaaggggatagcagttcgctatccccaagggagactttccagcaagatctcaaaaaacgagacactcggcaaattatgcggctttaccattaacagattcagccacaagaacgacagcgtgtctgtttcgctcaggatgttcactccagatttctgattccgggatgcttttcccgtcataactgatccgttcgccatcaaacgggtaataccgtgcggaatcagtatctaaaataaacaccttcagattcgttgaacgacgcgcaatatgctgccagagagctttacctccttcatattgctcgttatcacttaatagtacaacgcccgcttttgtgactatcgtttcataaacaaacgttgcaagaccaacatcacgtacagcgccatcgacaacaatcccttcaatctgagcaacatcctgttcttcccagaatttctggacaaacacgccttcaagccggggacgacgctgaagctccagagtggcaacaaccttatggcgaacatcaccatcaataacagaaggtgcagcttcgattaccgcagcaaacggagtctttggatcccagatgatctggtaaagcacgccctgaatagttactccatccagtatcgaaaaacgacgagctacagtagcaggggagtaagacattggaattacagccatttttgaatcccctctgagtaataccggcacgaaaatttacctcaataattatagtaaacaatacaagaaccaagtgcatcaacaatacccatcaattgtacacaattcgtacatcgaccaggaactccctcaccttctgccaaacagattgacaacattattgcctgtttgctgttgatagttattaacccggtcctcccagacctcaagtgctctgcgtttttctggcaaataatcgtatcgatcataatgttttgaactgacatcgttcaacgcatgattttgaatacgatcgcggatttccttactgatcccagcttctcccattaacgttttacaggtccgacgtaagtcacgtgctgtaaaaattttaaagtcaggattaaaagcccggaaatacatgatagcgcgagccagactgtccgtacgaaccggacgcttaccattagtcgaaagtggaaaaatgtaagggctggatttttcttttgttaactcctgcacacaggataattcctgtaatgctgattcagtcaacggtatcaaatgctctcgtttatttttagagacatcagcagtcaccagcagcgttttttgttgaaaatcaacatcacaccactgactggcgatcatttcgaagggacgttgccctccggtatagatacagaatcggatcaaatgttgcatcaataatccaacgttggttgcttcagcaaaatgttccattagaaaacgcaactcttcaagtgtcagccaggtatcaccgactttttcagcagatgactgtttcggtatcactgacaccggatttgcctccagcccaaaagtaatccctgcacttgtgttcatcggatcgttatctgctttcagtccatagttaaatgcagccatcaggtaagaacggatccggttagagtgaaccacagcaccacgctgaatgatcccggccaggatatgtttaatctgtccggaagtcacatctttagctttagtttcacgggggatcactgtatagcattcattttcaaggcgtttcagaacatcctgccatgtcctcttattatcaattttcattttgttaacataaccatgaatcaatgcttcaaatgagccctgtgattgatggagttgtatccgctgctgttctgcaaactgttgtcgttccagttctgcctggggatcctttccttcaatgagccaggcaccatacttttttgccagttcattcgctgtggcgagtttcatctcaggccatatacccaattgaatgaatctttcttttttccctttttccacgtaatagcggaaatagaaaatcttgctgccagaagactgaactttgacaccaagtcgtccagtgccacgttgagagctgttgctccagacatagaacgatgtcttttttgctttcaatgctcggatggctgtttcagtaagattgacggccatagaacctcttttctaaaccagtaacaatcagaataactcgtgattttgggtcaggtaatgggtcaggtaacgatcgtacaatgaagaaaaaacggaaccaagcggagacagagaaaattacataatccattgattataaacaactaataaagcaatcacgaacaaacaaaaacaatatagaacgaacttgcctcatgactcataatcgccaggtcgctggttcaaatccagcaagggccaccaaccgccactagctcatcgggaaagagcgtcaaccctttaagttgagtgtgcgaggttcgagtccccggtggcggtccagtgccgacttagctcagtaggtagagcaactgacttgtaatcagtaggtcaccagttcgattccggtagtcggcaccatatgcgggtatcgtataatggctattacctcagccttccaagctgatgatgcgggttcgattcccgctacccgctccagcagtagacgataccaggttgttttgggcactgacatattatatgtgggatgttttcctgaatctttatccacatcctgttctgtaatacgtgatatcggttacagcccagtgctgtctttttacaacagcgtaatggtgcattatcggtggagatgttgtatttcctgacagggccggtgatgcatcattccgatgttgttaacatctataaaaaacgttgagattaatcacgtattaagcaaaacctggaaattcatcttaaccgccgtaccaggcggttttttttattcagtttcttcatggctcgctactgcgggcctttttcatttcttcgccctgctcagcgtatgtcaaatctgaatacaccacacaaaaggtatctgcgggtgcctttgacggggtgttgttttttacgggccgctggtggcccttttttatttacaggagaaaaaaagtatgtctgaacccttatccggttccggcacggcggctgcgctcggaggggcgacggtattcgggctgttcaccggaacggatttcgggattgtgtttggtgcgttcgcgggggcgttgtttgtggcaacgatgccgcaggcgctttctgtctggcgggtggcggcgcattttctggtgtcgtttattatcggcgtactgggggcggatgtgatggcgtcttatctggtcgaaaaactggggcttcacagtaaatctgtcgacgcgctgtgtgcagtgctggtgtctgtggtgtcggtgaagattctgtcgttcatccaccagcaggatatcgcatcgctggtgtcaggacggttctcccgcctgcgaggcggaggaggcggtaatgttaagtaaccttcccggattactgaatgtggcgttatgcacggttatcgtgctgacgctctttttttatcgtcgtcgcgattccaggcataaaccgctgatgtcatggctggcctggctgctgacgctgctgtatgccttttcgcctctcagctatctgtgtggtcgcccgttagcaacgggctggctggatgtgttttttaatctgctgttctgcgtgctggtgatacgcgcacgcgggaacgtcacaagaatctttccattgttgaggtgaatatgtcgggtaaattcagattcagccgccggagcgagaaaaatctggaaggcgtcaaaccacagctggttgctgtagttcgccgcgcccttgaactgtcggaggttgatttcggtattacggagggcctgcgcacgaaagaacgccagaaacagctggttgcagaaggtaagagccagaccatgaacagccgccacctgaccggtgatgcggtggatgttgtggcctggggtggcagccaggtgtcatgggactggcctctgtacgagaaaatcgcgcaggcatttaagcaggctgccgcagagctgggaactgccatcgaatggggcggggactggaccagcctgaaagacggaccgcattttcagttgaggcgataactaatacaaaaccccggcagaggaactgttcggggttaatgcagaaaatatgttgactctttgaatgattgttacgctttatcgtgagtcagttttccgtcaagaatgagacgattgttttcgatatgaagaaccagtgtttcaagatattctggctttaacttccaccatttcattttttttgctatttgtgtcaggcaatgattatgggtgaatataacggtagttttattatcggatgacaatttgagtatgttctttgcagcatcaagtccgcatgttgcagccaacggtatccgggaggctgcttttcctccagagaaaaaacaggctgtctgcattgtccgtatggtatccgtggagtaaaggctgaatgacgggaaagtattgctaaatatttttccataatcacgagctttaatggcaccattgacggtaattcctttattgcttgagagacatgcatttttgcttctgtcacatcgttcaccgtgacggataaggaaaattgtctggtgttgttgatttattttatgcgcctgtttcatattgattgtggtgggtgttcttaaaaaataaacaaacaaaagagtagttaaaatcaaagtgattaaataagtaattttctttatttctcgacgctgcatatgaaaagtcttttgcaaaaataaatgagattaaaaaatatatttcttaaatattaagaaaatcttaacgcgcaatgtcgtttgttgcttttataacttgcaacagattgggtttttttgatgttgaacaatcagcattacagcagtccttcagtgaggggctgcgataatgctgatgtttaattgagcataaatgataattgctctcatttttcatgggtcctcccggtggggtggccttgccacggggcgggagcgtcgaggaaaaaggctagtttttgaaatttcatccgtcatcaccaccactataattgattgatattacagctgttttattttcatggtgtcgattttgattgttttttgttcatcactgacaccgtttgcctaaagttgtttgcaagatgcatgtttaaaacattctggagcgggtatggatcgagagttaaaaaatctgacgctgaatatcagtcaactggcggcactgtcaggtgtacatcgccagactgctgcggcaaggctgcaaaatctacccgttgcaggggggcatgaaagcaacctcaagctttatcgggtggttgatattgtgtcggcatttctggcattacctccgccggttgcagaaggcaagagccagaccatgaacagccgccacctgaccggtgatgcggtggatgttgtggcctgggttggcagccaggtgtcatgggactggcctctgtacgagaaaatcgcgcaggcatttaagcaggctgccgcagagctgggaactgccatcgaatggggcggggactggaaaacactgaaagacgggcctcattttcaattgaagcgatagcttgcaaaacatacagggccgccatgagcggcttttttattgctcaaaaaacgaaagaacggaggtacgtatgtacgcactgaaaaaaattaccgtaactgaagatggtcgccaggttgaggaagtgcatgtcctgggagatatgtatcgtctggagttctatccgcgtgacactcatcttgcagcaaaaattgagtattgccggggcggggatattccatgtattccggtagaaaaagaggatgaggcttacattaccacgttgaccggagacacggtgcgttgtatctgtcgcggtgacagtaaagccagggtgaaatagccagatgccgcacccagggcagtaaataaaaaaacaaacccggctgctggaacagtccggggttttgagttttcacgtcagagaggaaattgtgagtagtgagtacggagaaaatcctcgtgggaaagtataaaagattctttttgaggttgtcattatgaaaggtattgaagtggaaactcccgcgagccttgatttgacaagggctgcggcctttgcaattcgccttgtggcggtcgctgttctgatttgggctgtgcgttggtggtgatatgacgcgaaaacactggacacacagaatgccgcgaacggcggcgaaatgggtagcgatactggtgccttttttattggtgggatgcgtcagcctggataaagcgcgccagcttttcgataccgcttctctggtctgtgaaattgtcgacggtgttcggcagtgtctgcagaactgatcgcctgtaagagcagaatattttgctgaaaaatgaagagtgcgccagcgtccggaaagcatgaaattctgtgtttgtggctactcaataaaataaattctttctgtcgccgcgaatactcaaatgttgatcagtgcccggtgcggcgacgggctttgatatcaggagacgatgatggaaaaaacagaaagcaaaccgattgtaattggtgctgatgctgctccgtttaagtttgagttgtctcaactggtggagatgcgcatcagtgatgaatggggtgaggttaaagcccgcgcgcagtatgcggatggcgaaaaccagtacttgatccactacaaagcagctgatggtcgcgccacgacggagtggtttggtgagtcaatgctggaagcaacagaagatgatcgtcatcctggttgtccggtatttgcctgcatgaaattgccggaaggcgcagtagttgaactgcagccgggtgagatgttcgtgatgacagacatcattgatggtaaaccgcagtattcgcgtattgaaatgaatggtaagagtgctcgcctgattcgtgagtaacaggcattacagcagcccttctgtgtgaggggttgcgataatgcaggtgttagagcgtgtaaatgataattactcccatttcaacgggtcctttctggaacctgaaacaccgagggtctggggacgcgcaaaaacgcgctatttatgaaaattttcagggaaaaagcagatccgttcttcttctggctaacctgttgtttaatagagttttcttaaaaaaaagaaaggatctggcagcggtgatttttcgctgaaaaaagcgttttgagatcctttcttctttttgtgaggaatatgtgccgtgaaggttaacaaaaagaaactggcggaaatttttgagtgcgatgtcagaacaatcactggctggcaaagtcaggggctgagagttttgtcggggggaggcaaaggtatcgaagccatgttcaatactgcagaagccattgagtggtatgcgcagcgggaaaaagatatcgaaaacgaaaagctccgcaaagaactggaagatttgcgtgcgactgcagaatcagatttacaacccggcaccattgactatgaacgctaccggttaaccaaagcacaggctgacgcacaggagctgaaaaatgcccgtgaagaagggctggtgctggaaacagaattgtttaccttcattctgcaacgtgtggcacaggagatttcggggatacttgtacgtgtgccgctgacattacagcgtaaatatccggatatttcaccgtcacaccttgatgtggtgaaaactgaaatcgcgaaagcctccaatgttgcagctaaagccggtgaaaacgtgggcaggtggattgatgatttcagacgcacagaaggcagctaatgcagccggtgcgatagctacagggcttttatctctcaatattccggttccactgacgacggttcagtgggctgatcaacattattatctgccgaaagaatcttcatacactcccggacaatgggaaaccctgccgtttcagcttgccattatgaacagcatgggaaatgaccggatccgcaccgttaatctgattaaatcggcgcgcgttggttacaccaaaatgctgttgggggtggaggcttattttattgagcataaatcccgtaacagtctgctttttcagccaacagattctgctgcagaagatttcatgaaatctcatgttgagccaacgatcagggatgttcctgcattgctggagctggctccatggttcggaagaaagcaccgcgataatacactcaccctgaagcgtttttcctccggtgtgggtttctggtgccttggcggcgccgctgctaaaaactaccgtgaaaaatctgtggatgtggtctgctatgacgaactctcctcgtttgaaccggatgtggaaaaagaaggttcgccgacgctgcttggcgataagcgtatcgaaggctcggtatggcctaaatccatacgtggctcaacgccaaaaattaaaggctcctgccagattgagaaagccgcaaatgaatcagcgcatttcatgcggttttatgtcccttgccctcattgcggggaggcccagtatctgaagtttggcgatgatgcgacgccatttggcctgaaatgggagaagggtaaaccggaaacggtgtattacctgtgtgaacataatggctgtgtgatccggcagtcggaacttgaccagaccgacgggcgctggatttgtgacaataccgggatgtggacgcgcgacggcctggcattttacagcgccggcgatgaggagatgccaccgccgcgctccgtcactttccacatctggacggcgtatagtccgttcaccacctgggtacagattgtttatgactggctggatgcgctgaaggatccgaacggcgtcaagacgtttattaacaccacgctcggggagccctatgaagaggctgtggcagaaaagctgagttttgagttgttactggaaaaggtctgccactatggtgcgcaggttcccctgcgggtggtttacctgaccgccgggatcgactcccagaaagatcgctatgaaatttatgtctggggctgggctcccggcgaagaagcctttctgattgataagcaaattatcatggggcgaccggaagacgaggacacccttaaacgtgttgatacggtgatccggaaaaaatatcgtcatgctgacggtactgaaatttccatttcccgtgtctgctgggataccggtggtatcgaccaggacattgtgtatcagcgttcaaggaaacacggcactttttttgtgcttcccataaaaggggcatcggtgtacggcaagccggtgatcaccatgcccaaaaagcgcaaccagcgtggtgtgtttttgtgtgaggtgggctccgataccgtcaaggaaatgctgtacgcccgttttgccctgccagtggtctctgccagtgaagccgccccgtacaccttccgttttcctgataaccccgacattttttcggaagaagaggcgcgtcagatcgtggcggaagagctggtggagaaggtggttaatggcagggtgaaactgctgtgggataaaaaagggcgacgcaacgaagccctcgactgcctggtatatgcctatgctgccctgcgtatttcagttcagcggtggcagctggatcttgaagcactggcccgtgccagaagagatgagcaggacgacgatgagatgagtctggaagaaatcgcggctgcactgagtggaggataaagaatggtttatacgcatgaaatgctttgtgatgcccgccgggcattacatgaactgatgatcggacgtgctgtggtttccgtcagcaaggacgggcgtcaggttcagtattcgcgggcgacgattggtgaactgcgtcagtatattgaagagctggaaagtgcgctgggcgtatccggacggcgtcgcggcccggcaggagtggggctgtgaacggggaactggtggatcttcacgggcagccactgcggcagagtatggggtattccggagggggtaccggatttggcgggcagcttgcggaatggctgcctgcaccggaaagtgccgacgtggcgctcttaccttccattcagctgggtaacgcccgtgcggatgatctggtccgcaataacggtattgccgcaaacgccgttgaaattcataaagaccatatcgtcggacacatgtttcgtctgagttaccggcccaactggcgctggctggggatgtcggaagccgattcacatgcctttattgaagatgtggaggcggcgtggatggaattctgcgatccggtgtttggttcgatggatgtggaggggcgtcgctcgtttaccgaatttattcgtgaaggggtgggcgttcatacatttaacggtgaaatttttgtccagcccgtatgggatacggaatccacgtcattattccggacgaaattcaaaaccatcagcccgaaacgtgtcagtacacccggttatggtaccggcgatcgttttatgcgtgccggggtggaaatcaaccggtacggaaaagcactggcctaccatgttcaggaagatgactggcccggttacggtgtcagcaactggacgcggattgcggcgacgctgccctccgggcgaccgggaatgatccatgtgtttcagccgcaggaggacggacagacgcgcggggccaaccagttttattctgtcatggagcgcctcaagatgctcgacacactgcaggccacgcaactgcagtcggcggtggtgcgggcgatgtatgccgcgacgattgaatccacgctggattcggaaaaagcatttgaatatatcgccggggtgggagatggcggtaaaaatcccctgaacaccatcatgaaaggctacgcgcgttattacgccaccaatacggtaaagctgggcggggtccgtattccgcatctttatccgggggattcactgaatctgcagacagcgcagaatgcagataatggtttctctgaactggaaaaggcgctgttacgttacatcgctgccggactgggggtgtcctatgaacagctttcccgtgattattcacaggtcagttattccagtgccagggcatccgccaatgagtcgtggcggtattttatgggcaacgaaaatttgtggccagtcgactggcatcacagatgtttgcctgctggctggaggaagcacttattcgcggtgtgatccgcccgccgaaatcccgtttttcattctgggaggcccgttccggatggtgtcgtgccgagtggattggtgccggtcgcatggcgattgatggccttaaggaagtgcaggaagcggtgatgcgtattgaaggtggtttaagcacgtatgagaaagagctggccctgatgggcgatgactatcaggagattttccgccagcaactgcgtgaaagccaggagcgacaggcagcgggtcttccccgccccatctggataaaggacacgtttcagcagcagatccgacagacaacgggagaaaaagtcgatgcgtcgtaatttatcgcatattgccgccatggcatttaatgagccgcttttactggaacccgcctatgcgcgggttttcttttgcgcgctgggtaaagagatgggtgccggcagccttgccgttcctcagcaggctgttcagcttgatgctgatggtatgcaactggctgtgactgactatatggcgggcggtcagcgtccggcaaagagttaccaggtgaagaatggcatcgccattcttccggtgagcggcacgctggtgcataaactgggtaccctgcggccttactccggcatgactggctatgacggcctgacggcccgccttcagatggcggtgaatgatccggatgtgcgcggcattttgctggatatcgacagcccgggcggtcaggctgccggggcgtttgactgtgctgacatgatttaccgtctgcgggaacagaagcccgtgtgggcgctgtgtaatgacatggcctgttcagccgccatgttgctggcggcagcctgtacccgtcggctggtcacgcagacggcaaaaattggttcgattggcgtgatgatggcgcacaccagttacgagaaacaactggcacaggaaggggtggacatcacgctgatttactccgggcagcataaggttgacggcaacagtattcaggcattgccggcaggtgtgcgtgcagattttcagcgccgtattgatgaggcccgccggatgtttgtcgacaaggtggcgctttatacggggctgagttcagaggcggtgatgaataccgaggctgccgtttatgacggtcaggcaggcattgatgcaggcctggctgatcaactgattaatgctgcagatgccgttgaagtgatggtttctgtactgaatgactctgttacgaaggagaatgcaatgactgttaaaaatctcaccgttgctgaagcggtggcccaggaaaatcagcgcgtgatggggaccctgaattgtcaggaggcgaaagggcgcgagcaactggcgcaaatgctggcaggtcagccaggaatgacggttgagcaggcgaaaacgttgcttgcagctgcgccggttgccggtactgacagcacgggcgatcagattatggggctgccggaagcaaaggggcgtgagcaactggcacagatgctggcaggtcagccggggatgacggtggagcaggcgaaagcgtttctggcggcagcccctgctgctggtgctgcaggcacaggcgatcagattatggcgttaccggaagcaaaagggcgtgaacaactcgcgcaggcgctggctgaacagccgggaatgaccgttgaccaggccaaaacgttactggcggcggcaccggttgctggttctgcaagtgtcggcgatcagattatggcgctgccggaggcaaaagggcgcgagcaacttgcacaggcactgacagaacaaccgggaatgacggtggcgcaggcgaaaacgctgctggcagccgcgccggcggcatcgcaaccgtcacaggaaacactttttgatcgctttatggcacagcatgctgccagtgcggtttccggtggcggaactgccgggcgcggtgaggaagacctgctgatgagtatgccgtaagcgatatccggaattcagataaatcaggaggctgaaaaatgattaaaaccaccacggaaaagcgtgcagatgcgcgcatttttgccggaagcgatccggcgcataccgcaacagccaccagtggtatcagtgctgccacacctgcactgacgccactgatggtggatgacgccaccggaaaactggttgtctgggatggtcagaaagccggaacggctgtgggtgtgctggctctggcgcttgccgggaccgagcccatgctgacgtactacaaaagcggtacgtttgccactgagtcgctggtctggcctggttcggtggatgcggtgaaaaaagccaacgcatttgtgggaagtgccatcagccacgcctgatggtgaagtgattaactgaaaaaacgggtcgcgatgcggcccgtttgtgtttctgaaggaatataaattatggggttatttaccacgcgtcagttactcgggtacaccgagcagaaagtgaaatttcgtgcgctgtttcttgagctgttctttcgtcgcacgatcactttccatactcaggaagtcatgctggataaaattaccggcaaaacaccggttgcggcgtatgtgtctccggtggtgtcaggcaaagtgctgcgcagccgtggtggtgaaacccgcgtgttacgtcccggttatgtaaaaccaaaacaccgctttgattatcagcaggctgtagaacgtcttccgggggaagatccggcccgccttaatgacccggcttaccgccgtctgcgtattctgacggacaacctgaaacaggaagagcaggcgattgtgcaggtggaagaaatgcaggcagtcagtgctgttctgcagggtaaatacactatgagcggcgagcagtttgagacggtggaagtggattttgggcgttctgccgccaataacattacgcaggctggcggacgcgaatggtcaaagcagaatgctgacacctttgagccgacgcatgatcttgatgcgtactgcgattttgcttccggtaccatcaatatcgcgattatggacggcacggtctggcgtatgctgaacggttttaaactgttccgtgaaaaactggatacccgccgtggctccaaatctgagctggaaaccgcactgaaagacctgggttccgtggtttcctttaagggctggtacggcgatctggctgtcgtggtggcgaagacaacgtatgttgacgaaaacggggatgaacagcgttatctgccggaaggtacactgattctgggaaacactcaggcggagggcgtccgttgctatggcgcaatccaggataatcaggcgctgagtgaagggatcacctctgcgattcgttatccgaaacactgggaggaagtgggggatcctggttgcgaatatacaatgacgcagtctgcgccgttgatggtgctgccggatccggatgcgtttgtggtggttcaggtgaaataagacagggcgggatattcccgcctttttctttagcgcacgggagagatgtgatgacaaaagagcagatgactgaacgtttgcaggaactggcagtgattctggggcgtgaagcagatatttcaggttcaaaagccgatcttgagcagcgtctggcggaatgggaggaggaggccgctggattcgatggggaggagacggggaaggaagaggtgggcaacgatgcatccggcgacggaatgcattctgagcagggactcgcccgggtgcgtatgctgaaaacggcgcatatgccagcctgtgatgctgtgacgggaaaaatgttgatgtttgcccgggcctccagtgttgtgctggttaatgaagccacagttcccgcgttgctggcagacggtctggcagaaaaaatccgggagtgatgatgttcgataatctgttcgatcaggccatgagtgatgcggatgacatcatcctggatacgatggggacggaaatcagcatatatccgggcggcacggaaagaaaaatccgtgccgtttttgatgccccggcagataacaccgggatgaacactggcagcggcgaaattcgtgatactgcgcccgtgttatttacccggagcgcatgggccgccggtctgaaaaaatatgacagggtcatgatccacggcgaaccctatcaggtagtcgatcccggctgggatgagtcaggcgctgcgggtcagggggtgattaccatcacccttgcgcgtggagagcccgggagaaatacacctgctgcaccggaacgaccgagtaaacgttatggcagtcagagagcatgaacgaagcagtgcccggcagcgacggctggcacgaaacctcgttgtcgatattgatgaagatgaggtgctgaaaattatcgctaaactgggtgggtcaaaaagtcagatccgtaaagcctgggcgtggcgctgaaaagagccgcgtctgcactgcggatgaaggccctggcagagtttaaaaaacaggttgcgccacgcagtcagaaaatgatcaaaaagcgtgttctgcataattttatcattcgtcgtaacggtgatgagtttgatgaggcgaaggtatggttcggtctgaacgccatcaaagtacgcgatctgcgcggacgcatcagtgggggacgacgcggcgaacgccatcagttgcgcgatgagcgggggcgttttgcaccagcttccagccgcaggaaggctcgggagatcagttttaaacctgccggggaatccctgcctgtcaccacctggtcaacggatgatgcctttatcaaccagttcgaagcggaaaatcgtaacggacgtatatcaaaaaggaaaacgatactgatccgacaggcatccggacgacggagggtgcgtgaagcggaaattgatatttatgaagccatgctgaaccgtatagaggattttgtttttccggatgcggaagcactgatcctgaaaaattttgagcatgaactgaaattccgggtatttaaggggctggagtgatggagccattgatgatgggcgcctggcatcaggcggtgattgacagtctgaaacaaattccctgggtggaagatgccgatgagtatccggaaaaagtgacgcaactggtgacgcctgccgtgtttgtggatgtaccgggctgggacaaggctcagtttgccgacgggcagacgcgggtcacgctgaaatgtgatctgtttgtggtgacagaccgggccgggaagacggaaaacgtgccaaaaccgcagatttttgcccgttgtctggcgatggatttatctgactggattgagggggccacgttcgggctggataacgttgatccggctgtttttattgatgctgaggtggataccttcgaccggcttctggatgactacatcgttttccgcgtttcttttgaacaggatattcctgtcggagaagatccgttcgaggttccggctggtgcgcctttacaggaagtctggctggggaaagctccggaaaccggcaagaaacatgagcgggattatcgtcttatctggaaaacagagggcaccggtgatgagtctggcagatgaagtggcagagttacgccgcagggtggcggacatggtccgtcgcggcgtggtggacgaggtgatcccgggtagcccggtgatggttcgggtggatatcggggatgtgctttcgcctccgttgccctggattcaggtacagtccgggcgctacatgcaggtcagtaattacccggctcccggagatgccgttacagtgatatcggaggcgggcgatttgcgtaacggtcgggtgtatccgggggccaatattgacgccattcctgtccctgagggcagtgaatacgaacatgttattttgtttgataccggaacggaaatccgttacgaccgtcaggctaatgccctgtccatcacgctggctgaaggcggcagctataaaattaccggcaggggaaccctggacggtccggtagaaatcacagataccctgaccgtacagggtaaagcaaccatgaatgctgaggcggtggttaaggcggatctgatggtcggtggtgaggtttctgattatcacggaacgatgagtcaaatcagaattgtctataacggtcacaatcaccggggcgacagtggtggcagcaccggacagcctggtcagcaaatgtaatctcctttcagttctttttccggaataaacaacatgattggtattgattcagccaccggcagatatctgcacggtaacgaacatctgcgccagtccgtcactgatattttgtcaacaccggccggcagccgggtcctgctcagggaatacggcagcagacttttcagtctgcttgataacccacaggatgatttcacgcgggtgagaattgttcgcgaaacggtaaccgcccttgaacgctgggaaccccgcctgactctccggcgggtggaagtgacgtggacaggagaaggaagcgcgtggctgacgcttgtcggggtgaataacgaaactcaggatacgattcgactcgaggagataaaaattggcaacgtctcaggcaattattgatctgtctgcgataccggtaccggatgcggtggaggtgccggacactgctgtgctggtcactcagatagtgacgaagtatcaggagctggacacgttgttttcggccctggtggaatccgatccggcgtataaatgggcagaggcgctggcttttcgcgtggcgctgatgcgccagcaggtcaatgatgctgtccggggtgtattgcttgcgagtgcccggaggaacgacctggatcagattggtgcgaattttcaggtgcagcgtctggtgattaccccggcagatgacagcaccattccgcccacgcctgcggtgtatgaagatgatgacgcttttcgcgaacgtatccagttgtcatgggcacggctgagcaccgccggcgcgaaaaatgcgtaccactattttgcgcaaagtgctgatcctgatgtgctggatgtgaaggcttacgggccggaaacgcattcacaggaagggcgtgtttttctttatgtgttatcccggtccggaaatggcactgcatcacaacccctgctggataaggtggcagcatcagtctgtgatgatgaaacccgtcccctgacggattttgtcagtgtccggacggcagaaattattccctacgatgtggtggcggatattcatattccctacggactggatggtgaactggttatggcaaatgcccgcaaggcgctgcagttatacactgacagcgtccacctgattggctcggtggcatcccgttctggcatggatggtgcccttcaccagaccggggtgattacggtgaatctgacctctccgggcagtgatatcgttcctgcgatggggcaggcaccgtggtgccgcaaggtaacgctgaataaggtggagacaactgatgaatgacgatatcaggagcatactgccggtcagtgccagccgggcagagcgggtggtggacagtaccgccggtgatatgctggcggaaatcgcagtatgtctgatccgctatgtcaaaaatcccgatttatgtcctgctgaattgctgccatggctggcctgggaaatggcggtggacacctggaatgaacactggacggaggcggaaaaacggtctgcgataaaacgtgctgcatacatccaccgccacagagggactaaagcggcgctgatggcatcgctggctgacagtcccttccggtcgcagattgttgagtggtatgagcagaccccacccggggagccgtataccttccgtctgaacgtggagcagaaagatttaccggtgctgatgaatgatcatcaggatctgaagcatgcggtgctccgtgccaaaaatctgcgcagctggttcagtattcacgtttacgggaacagcacagggcgtggatttggttacggctatgtgatggcgacagaaaaaatcagaagtaccggtgtgacaacaaagacagtgcccacaggcgggcagagtgaggcaggtgtatgaatggactgattctgacaacgtccggcgctgcagaaattgaagcagcatatcagaacgggcaaaccgtgaccgtccggcatgttctgcttggtgacgggggcgggcgtgcattgccatccacgccggatgaaatggcagcaatgacatcgttgtacggcgaattcgggcaggaacccttttccgacggtgcggtggaggagggcttcatcagcggggatattgtgattgactgtaaatcataccccggtaaaacccttcgtgaactggggatgtgtggggtggtgatcaattctggactgagtccgagcagcctggacgaacctgcaagccttgagtggtgcgggatgtgagagatttcaccgattctggatcgttttgaaagaaatgaccaaaagtgcctttttttacgctttattctggactactttgatctggtggtgcaggaaagcgatcgccttttaaaagattttaaaacccgttttaaccttgcttgatttgttcctttcttatccgtcttctgtattggtcttgttgtggatgtcgctagttagttggcagcatgcgcccaccaggcagtaggcgttcatgctgattttttgcttacaggcttcgtttcttgctccggcgtggcaacggtctgaccacctggcgacccagtccgtgcacgagattcgatgcgtcgcaaaatctctttgtcagtttcttcattaccagccaatgccatgcaaatagcgtctttaagcgattccctgatgtttaggcttctgatggcattctcctgttcgtccaggtcgctgtcggcctgcgtagcttgcctggtgggttgttgtaagcgttccaagacgcctttgatgccaatacaacacagcatatcaataagacgttctctatcttctggagtagctcgccttagtatttcatcgacaatacttgtgtttgggcggttaacgtcttctgtaggtacctttttttctattattggatcgcactcgctctcaccgtagaccaaccattccagtgatacattctctaattttgctatcgtagcgaccacatttaggccgggagtggtgcctttctcaaagtagttatttatggtcgagtacggcaacccccagtctgaggtagctttacgcagactcctagtgccaaccagttgcttgattctgtcctgaatgctttcttttctattctgagaaaaggaaaaatcatcggcggtttgtttactcattttcttttctcgcaatctattgatttacaacatctttctacaaaaagactttcttttcaccaaaataagaaaagaaagcttgtaattttctatttgtggatcaatacttatatccgaagggataacacggcggtgttatccgcacggataacttttaagggtaacctaatgatggttagaaatgaagtaatgaacaaagactggcaccgcgagtacatcgttgccgctgtgcacaccaaaggttttacattgcgtgaactttctgaacgcgctggtctaaaaaaagactctttaaaaaatgcactgtatcgctcatgccctaaatatgaacgcatcatagccgatgctattggtgtggaacctgcggagatctggccaagccggtatgccagtaaggcggcgtaatgttttatccagccaatgagctggccggtcttcctggtttgcccggtacagttcagggggtgcgctggacgctcaatcggatcacagagacgcacccggaatggaagcgcaagcgtgaaggcacaaaagcattcgagtatcacatcgactgcctgcccgctgaagcgcagaaagttttacgtaagcgcctgacccatcaggtcctggaagatacgcaactgcccgcagtggttgagcagaaggcagttaaaaacgtcaccgttcgcgatgaactggaggtgatggtcaaatgcccggaactggcattacgcgaagtccaggcactgaccgacaagcaaaaggccatcgctgatgcgcggatattgctggctaccgaagtgcataaactgcgtgaatacgcaggaatgtccaggacggcggcgataaaacacatcgttgatggtatccgccaggaggctttgcccgagcgtgttattgtggcaggtaatactgctaatgcccgacagggtaaacggactggcgtcagtacagggagtttacaggaatggtattccgcctggctgatggcgcgcggtgatgccaatcagttactggcgttactggctcccggtcatcataagggaacaccgtgggagcaggtctggtggttgagcgatttctttatgttctatcgctcatggaagcgcccgaccgttgaatatgcgtatcgcgagttttcagcctggtggcatgaaaaacacgcgaacgatgcgggaatgctggcggcactgccttcagttcacgcagtaagacgggtgttaagcagcgtcccggtgattgttaaagagcgtttccgctccaccggttcagcctggcgttcgctcaatccctttgtgcggcgcgactggacatcattaccggttaatgcggtatgggtcggggatggtcactgtatgaaaatgaccgcgtttaaccccctgaccggcaatattttccggccagaagtgacgctggttatggatgcggggcaacgctttgttgtgggctggtcactgtccctgtcggagaacgtgatagccgttgctgatgcgttacgttacggcatggcgcagcacgggataccgctgatttattactccgataacgggggcggtgaaaaaaaccgggtgcttgatgccgatattaccgggattctgccccggctgggtgtggaacatcacacggggataccaggtaacccgcaggggcgcggggtgattgaacgggcaaacaaaggaatacccaaagacgtggctctgagtttccagacgtactgcgcaagggatgcagacaaggaaaccgtaatgatgcagcaacggattatgcagtcagccattaaggccacccacaaagggaaagagctgacaaaacggcaggttaaggcgagggatgaaatccctacctttgagcaactgatggccgccatagagctggaggtcagacgctataacaaccggccacacagcagcctaccccgcaaagaggatggcgaatattacagcccggcagcgtatcgccggaaactgataaaagagcagaatgttgaaattgatttcctgtcgccggaagaactgcatgaaatgttcagaccggaagtgacgcgcaaaacatttcgcggggaaattcagttattcaacaatatttattactcgtatgagctggccgcagagcacgggaatgaagtcagggtcagttacgatattcatgatgcaaacagcgtcattgtccggcgggctgatggctcttatatctgcgatgccatctggaacggtaacaaggttgatgccttcgctaaaccagttatcgaacaaaaactggagaaacgcgtcaggggccgcattgcacgggccacgcagaaaatcgaagaggctaaacgcgagcttaccccggccattacgcagaagcctgactttaatctgggatatggactggaacgtcaggagaaaaaggaaaaagaagaactttatttattcgtgtctgaccgtgagcgcaatttaaagaaaaacggcacaaataatcgttaatttaaaaggtatttaattatgagtttaattacgcaattaaatgacgtaatggcccgtcgcggctttacgcagacccacgttgcccgtgctattggtcgtagcagcgccgttatcaaccagtatttgcagggcaaatatcagggcgatatggctgatattgaagaacgtatttctgcctttgtgacccgtgaatgggaaaaggaaaacaaccgccgtattaaagtgcgatttgtcaccaccggcatggccgccaaagggctggaggtgctgacctacgcccatctggagtgtgatatttgcgtgctgtatggcgcggcgggtctgggtaaaagcatgattctgagtgaatatgccgccagaaaccgggatgtagtgctcattgaagccgatattggctatacggccagaaagttactcgatgaactgtgccgtcagcttggggtaaaggttcacggcgatattcgcgagaagattgatgcctgtgtgcgtgaactgcgtgggtcaggtcgtctgctgatggtggatgaggctgaactgctcccctatcgtgcactggaggtattgcgccgtctgcatgacaaagcgggtatcgggattgtcctggcgggtatgcctcaccttctgattaaccttaagggccgttgtggtgagttcgctcaattatacagccgcgtggcgctggcgcttaacctgggcgatacgctgacgcaggaagattttaacaagattgccacagacatgatgccggaagcggcggacccggaaattggtgaggcactttacacacgttcgctgggtaatgcccgtcgtctgttcaagctggcgcgcggtgtgtaccggatttgtgatatcagcgatgcaccggtcagtgtgcaggccattgataaatattcagaaatgttaattcactgatggagagcaagacgatggacaagcagaccattaacgccgtccgttcccgtgcccgtgtggccatccacaccactggcggtcgtgtaacggggcagcatcaccgtttacctgtggtttatgcctgcccgcccgtgggtggtcctgtatggccggtaacggaaatcatccagacattcagcggcctgcgtcgtgtggttaaaacgtcctgtatcgacggctgtaccgtcgtatggcaataaaacgaggaattaaaagtgagcgtgaaattaacaatagtatttaccgacctgggtaataaccagtgccataaccttattcgggtggaaaatggcgacaatgccacactcgaagaagcggcaagaactctggggactgttggcgctatttgtacgattctgaaggagaaacacggaaatgaacggcttgatctgcaaatctaccatgactacgtgaaacaactggcacagggatgtccgtatattcctcaagaaacacaaatgcattgagggatgaaatatgtcactggagcttgaattaactttcagcctggacaggccaggtaaaccggagaaagccgtcgcgacgtatcagttgccgcctgatgtcacgggagagcaggtttccgacattatcataaaaactcactgttttatgaacgaaattatttttaaatcgtttgatttcaaaggagaaaaacatggcggttaagttggaagtaattatctataccaatgaaaaaggcagggttttaacccagattacaggaagttatttgaaggatggcgcttctgaaagggagtttcaggtggcaacaggattgcatgatgttatcaaggaagcactgagaaatgactacaacggcgtgaatattttttctgaaaacgctgcgccctgcgcacataacacaaattaatctgtaaatatcactgaggtaatttaattatgacgactgaaaataaagttaagcaatacacgaaaactcaagcacctgaaggttactgggtggatgcccgtggcgtaatgacacctgaaagccttatcaaagatattgaccgcgaccgtgagcagctggtcggtgagcttgtggagatggtgattgctgcctctgcctcactgcgtgaactgaaactacgtgcctttggtgatattcaggcgtttattgacctgtcggcgaaaaaatacggcgctgtgaaaggcggtaaaaaagggaatatcacgctgtacagctttgacgggcgttacaagattcagcgcgccatgcaggaccgtatcgcgcttgatgaacgcattcagaccgcgaaggcactgattgatgactgcctggctgactggacggaaggtgcacgccctgaaattaaagccatcatcagcgaggcattcagcacggacaaggaaggcaacattaacaccgggcgcgttctggctctgcgtcgtctcgatattacggaggaacgctgggataacgccatgaaactgattggtgaagccgtccaggtggttggcagcagaagctatatccgcgtgtatgagcgcgtcggtgattctgatgaataccgcgcaatcccgcttgatattgcaggggtttaacatgcatcaggatatcaaagagtacagagccggaaatagttgcgcggcgtattcgctgggcgcgtccagagcagaacaacgcggcgattatgccgaggctgaaaagctgtggcgtaaggcagcgcaaagcccgtgtagtactctgcgccgcatctgggcagaacaccgggcacagttctgtgctaatgctcaccagaaaggatggaagccgattcatgaacgcgaaacgctttaatcagttatatccgcctggtactcgtttcatgcacattgcacatcaggcggtgcgtggtggtcgggtggtaaaaactgttgcaccggccagagattttaaatgtggttgtgtggttgaaattaatgtcgagccttatttcgtaaaagtcgaaacactgaaagcaccgcattaatttaatttgtttttaattgttatttaaaacaggcgtaaacccgtcgggctggcttacgcctgaattaaggggatttgtatatgaaagataaagtctgggattttattgttactcctgaaggttttgctacccgttcatctgagaagttaaccaatgtaacgttatgggcgtcatcattgctgggccatctgggagcacctgccgattttatgtatgtggtacttgatgcacagattgccgggaatgctatggccagtaagggggcttatattcagggggatttgttcgccatgatggcgaatgacacagcagcgctgtatatcgccacacggaacatactgacaagaatatccatgctgtctgactgtaaggatatggaagacctcgcatacatccttgaagatgatttgctcactatctcaggtgtgcaggaatccctcccgcgtcagttgcggtttattgacctggtggagtcatataaagataagcctgatttttttcagattcgattcagtggaatggaactgctggatgaatattatccgctggattcgattgcccgtgatgtgaaggcgttcgtaaagtctgttgaccgtcattaccggaaagctgaacgtcgtagttaataagtctgtttttaattttattggtatatggcgtaaacccgccggggctggcttacgcctgaatcagagagagtttatttatgaatatcgctaagcaaaaaaagttcgcccgcgaaattaatctgacaatcgtttgttttaatcgtcttgcgaccagttctcaatcgacagcagatgttcattcagtaccgcagccagaacgaactccccacgttcctgatggccgtgccggaagttgcgtaattcagaattcaggatgctgaggttcagacgaccatgaaagataaatacattgccaaaatcaaaaaactgttacgccttgccagaggaacatcaagcccggaagaagccgctaacgctattgcaaaagcccaggtttatatgcgccagcatggtatcagcgaaaacgacgctgaattgttcgacattcaggaagctgccagcgcgggtgcgccgagtgatgccagtacgccgccgcgttatatgcacatcctgtgtgacctggtctgtaaagccttcggtgtcgagtgttacatctccggtgagtaccgggcttctggttcactcaaacgtcacgtgcgtttttatggctctgacagccgcccggaaatcgcggcttacgcgtttgatgtgctttcccgtcagatgatggcagagcgcaagaaatatcaggataaacactgcaaacgttgcggtccgtccacgcgggtagcccgtggcgaccagttctgcgaaggctgggtctttggtgcccgtgatgtcattgcggtgtatgacgtctccccggaagaaaaaagccgccttgagctttacagaaagaacctgcacagcactaagggactgcgcgacggggatatgcgcacagctaaagcgtgtcggggtgcagagtttgccgctactgcgggttttatcgccaggaaaaacgccagactgcatcagggggttaatggtcagagcaacagaccgctggcactggggagggtgtaacgatggcttttaaacttctcagtgttaccgaagcaatataccagcctcccggagaacgccacgaatacaggatgaatgacggtagcgcggcggttgagtttcccaaatatccgggggcttcccggtggcggttctatgacagtgcgggacgccggattattaaaagaaccgtgcacaacgccatgaaagccgccgtagaacgtcacaaaagaaggtttaactgcaaatgaatattgaattttatgactacggagtcaccgcaaaaatcattgttacatgctggttctgggagttccgcgctattgccgggttgtggatgcggcgctgtttgtggcccctgaagtacaccatcagagcggtggaggtcttttaatgagaaccgtcatcaccggtaaaacggtcccgatgttacgggcgtttaaagtggcaaaacaggaggcgacacgatgagcattgataaaacgataacgatagatgtagccatgaatacaggtctggcgcttatcggttatggctatatcacttttatgtcattcaggtggttgatttcttcggtctttaaacaatgtgaaaaacgtcgctgcaaagacaagcgcgtgaaggcactaaatgcgtttaatgacgcttttgatattgaccgtatgcaacagggcgacccggcacgcgtaattacccggggagatgtcgtgattttggtataccggagtgaaaaaaatgagcaggaggcggcgcagtgaaccagcaaaccagaataagcgataagagtctgaccagactgattgccgatgcggacaaggtgctggagcggaacacccccgttgccgatgaggaatggtggcaggatttccgggccgcaatgctggaacttcaggagcgccgcagggctgacagtacagagtcagtagtaaatacaggagaatgaaacgatgaaaaaccgtaaagcaatacgacttcttttacagcgacctgtgtgtatggtgtcgctggttatcagcaaccataagatagctgtactccatccatttggtcaggtggcttttaccgtaaatcgtaaacccaccgcgtcacagaacaggcggaagaaagggtacgcagtaagatgaaaaaccgtaaggcaaaaattctgttagctcgcagaaacggtgttggggtctggcgatggttgaggattagtaacagacgagtgaggttgacggggtgttgcggggtgatgttgcacagctgttgcaaaaagcccagcgcggcgcaaaaccgcaggaaaaatcacggtatgtaaaggaggtgccaggtgaagaaaatggtttttgtggcggcattgctgacaattacccaacaggcgcaggcttcagcagttattgtggcatctgccgctgcgaccacggctgctgtagctgctgcaaactctgcgaatatcgcaagccaacaggagcgagacgctgctaacgcatcagccagtgctctcccgatttctgttaagggcagtaagcaacatctggggttcataacgtgcggtaagcgttcttatgaagctgtaggctcactgggatgtacggtatatggcgacagtgagagcagagaaattccatggaaaacgtggcccggatacgttcttggctcgaagctcccggccagttatgaggtaaacgccgtgtcgtttgatcactataacggcgtggcaactgtctatttcacatactgaggcccggcatgaaattttctgaatcacggagcaacaacacgatgaaagccatcaccgtaactcgacgttcctgatttcgcgggttgtttaaacagtaatcaaatgcagaccaaaacatatgttttggtctgccaaaagtagtgttttggtcattatgaagattgaacaaatcggaatagctgctttcaggcagcaggctgaaagcggtggcgtggatgagttcgttgtgcagcggttcggtggtgtgtatcacctcttcgctgtgaatcgccacgccggggtgtcctattttctacaggaacgccgtggcgattacaagacatggctgtctcttgaccgtgccgctgcgttcttgtcagggattggcgtttcacgttttaccgtgcgttttgaggataacaaacatgctgaaaaagatgatcggggccattaaagccggtcaggcgtatctggggtgggatgatgccctttatcgccagacgctggcccgcctgaccggtaaaaccagcaccacacgctgcaatctcgatgaactgcgcatcatccgggaatacatgcacgaacagggattcccgcgcaaggcacccgctggtaaaggtcgccgccctcgtgttgcaatgagcagaaaatcagtattatccaaaattgaagcgttgctggctgatgccggtcgttcctgggcgtatgcagaaggactggcatctcacatgtataagcaacatgtgatcgaatggctgacggatgaacagctttttggagtgatggtggcgctggttaaagattcaagaaggagaaatcaatgatgaaaaaatggttgttttgtttagtaggggttattttctcttgttctgtgctggcacagacagaggaacaggcgcaaaaggaactgaaacgttatcaggatatgaagccattggctgaacagatgcttcgggaaagtggaaaactttattacgctatgccagaagctgcatcgcagtatcagcagggaaatattgaagagtggaagaatatcaaaaaaggactaaaacaactggatgaacaggccagtaaactgggggacgacccgcttgatcctgtgtatggttcctgcataaaaatgaaaaaccagctacaggattactggtctaacgttatcagggatgacaggcagtttctggagcgttcaagaaatcagtttaaagaatatcgtatggattgttttgattcgtttgtttttggtaaagagcaaatagaatcaagaaaaggcctggttattctagacctgactaaataagacttagtttagcccctgccatgcaggggcttttttgtggtctgtacaggcgatcatgtatggctataataacagtaagttactaccggagacgccatcatgcagaccttcagtgaaacagatcttcgcgatgcgcaggcactgctgcccgattccgtgcagcaactgattagcgtgattggcttccccgccctgacccggttaatccgttcttttggtggcgtgacgttaagcggtaaaaccggcgcacacgccggacgcaccggcggtgtccatgccctgttacatgatgtgctgaccgaagacgaaatcaacaaactgatccgttttcttggcggcgcaccgttttacattccccgttgcgatcatgcgttacgtgccctgcgtaacacccgttttatggctgatttacagcagcatgtaaaaggcggatgctcacaccggcaggcgctggcactgctctgtccccgttacgggatttcagaccggtacgcatggcagctgatacaccgacgacaaaaacagacttcgctgaaaagccccacccaggtggggctttttgattaatgggcctcagaaaaaggagacacttatgaccaactatacggcacttggcgagtatacagcctactcagagcaggccagggatgctgccggacgccgcttcgcttatatgaaaaatctggccagccagctaaaccgaatggctgaacaaccggatatggttgttcaggaagaagcgttgcagtgtgccattgctgacatcatcgccagcgaaaacgagatgcgcgcagcgatggaaaaggcgaacgcctctgctccgctttgtaataaacctcttattacgccggattctctttcccgcttctgatttatcaccccgccgccgcggggtgctgaactcccccagcagtacccaccacaccagaccgtttaccctgtccactcagaccacaaggcaccttaagggatagcgcccggcaaaagtcattctgtgcctttgaccgggtgttatttacgggccgtcagtggctcagatttacaggagaaactcatgtctgaacccttatcaggcggcggagctgtggcagtcaccatcggtggtgccagtgtgtttggtcttctcaccaataccgatttcggggtcgtggtgggcgcgtttgccggggcgctttttgttgtcacgcagcagaaagaaatcccggtctggcgaatggccatccacctgctcgtcgcgtttgtggttggcgttctgggggctggcgtggctgcgtcactgatgcagtggctgacccactacaacgacaagccgctagatgcattgtgtgcggtcggtgtctcggcgttatccatcaagatactgacctttctttatcaacaggaaatttcatcgctgttcggcctgttttccagactgcgcggcggagggggtggaaatggaaagtagccttgccggtatcgtgaacgtctggctgtgtctcgccattgtattggggttgtttgtgtatcgccgccacggtgcggcgcataaaccgatgattacctggctggcgtactggctgatgctcggatacatcatcatcccgttccgctggctgtccggtacatacacgcactccagctggctggttgtggcgctgaatctggttttctgtgcgcttatcgtgtgggcgcacgggaatttgtcaaaaatcctttcgttactgaggcatccacatgaaatcaaaagatgacatttttgatgaagtcctgggcaaagaaggcggttacgtcaatcaccctgacgataagggcggtccgaccaaatggggcattacggaaaaagtcgcccgcgcccacggatatcgtggcgatatgcgcgatttaacccgcgaacaggcgctggacatccttgaagctgattactggtatggcccgcgatttgaccagatcgccgcattatcccctgatattgccgcagagctgtgtgataccggtgtgaatatggggccaaccgtggcgtccagaatgcttcagcgctggctgaatgtgttcaatctgcgcggcaggatgtacccggatatggacgcagacggacgcatcgggcctcgtaccatcagtgcattgcgcgccttcctgaattatcgcggtcaggacggcgaacgggtgatgctgaaggccctgaactgcacgcagggtgagcgctatctggaactggcagagaaacgcgaggctaacgaatcgtttgtttatggctggctggaggggcgcgtggcggtatgacgcgtcagcactggacacacagaacgccacgtaaagctgcgcgctgtgttctggccctgtttctgatgatgttgcttccggtgggatgcacagacattaacagagcgggccagctgtttgacgcggcggcgcaggtctgccggattattgacggcatccggcagtgttcacagaactgattttttgaaggtctgacacagtgagcattatcagatttacagaatgcgcaggctcagggagcgccagcgctgtcatggtagtcgctgaacgcatcacccatttttaccgtcagtgcggtgcatatggtggcacggtcattgaactggataccgggaaaaacgtgtttgttcttgaaaatcccgacgaagttaaatgcctgattgaacaggctcagaaggacacttaatggcgtggtcacaggatatcagggacaaagtccgtaacgggtacatctttgaccagcttccgctggatatcgtcgccatgaagtacgccgtgccgcacgacaccgcgcggcgctggaaaacgcaggcaatgaagaacggcgacgactgggacaagctgcgggccgcgcacgcgctcgccggtgacgggctggaaagtgtcgcccgcaccgtgcttatcagtctggtggtgaagtgtcagacgacgcttgaacggctgaaccagaacccggacatcccgccgcaggagtccgtcgaactgctggcgagtctgtctgacagtctcagtaaggcggtggccagcagtaaaaaaatcctgccggaaaccgaccggctcgccacggcactggaagtggtgcagcggctcggcgcgttcatcaaggagcgtcacccggcacagtatgccccgtttcttgaggtgctcgaaggcttcgctaaagagcttgaggataatttcagttaaccacagcggcccggttttccgggccgtctgatatttgtataccaggtgtgacgtggcaaaacgtaaactttccattaaagagtttcagagaagcctgcaggagtacatcgccaacctccgccagaccatcgaggctgaatgtctggggttcgatgttaacccgcaggccacacaggcccgccgggcggcagtctgcgacccggtgacgggctacgattattttgtcgaaaactatttcccgcactacgtccgcaacccggcaaaaagtgagctgcataaatacctgttcagccgtctgccacaggtagtggcaagcccggacccggagaacgacgccatcgccgcgcctcgtggtgaggcaaaatccacgctggtgactcagctgtttaccctgtggaccattatccggggtattaagcattatccggtcatcattatggacagtatcgaccaggcttatccgatgctggaagccatcaaggctgaactggaatttaacccccgtttaaaaaacgatttcccggaagtgtgcgggcagggtcgcgtctggcgtatggggaccatcgtcacggccaacaatatcaaggtgaccgttgccggtagtggtaaaaagctgcgtggtctgcgccacggtccgtaccgtcctgacctggttatccttgacgacatcgagaacgacgagatggtgcgtaatccggagcagcgcgacaagctgcatgactggctcaccaaaaccgtgatgccgctgggcgaggctggcggtaaaaccgatattatttatatcggaaccatcctgcattacgactccgtgctgtcgcgcacgctgaataacccgatgtggaaaacagcccgctttaaggccgttattcagtggcctgccaatatgaagctgtgggacgagtgggaagaactcatccgcaacaaacagccggaagcagcggaggcactttaccgacagaacgaagccgacatgctcgccgggtcggtggtgtcatgggcggcgcgtcccctgctggcactgatgaaaatccgtgttcgtgacggtcatgacacctttgattctgaataccagaacgacccggtcagcggtgaagatgcgctgtttgcgggctgcattaagttctgggttaaccgtcttgatgaatgggtgttctacggcgctgttgaccccagcctcgggaagaagaataaaaaccgcgacccgtcggccattctcgtggggggctttaaccgctttaccggcattctggatgtggttgaagccgatatccgccgacgtctgccgaataaacttatcgaagacgtgatcaagtatcagcgtgaatatcactgcctgtgctggtcgtttgagtccgtccagtttcaggagtttctgcgtaccgtgctggttgagcgttcggcggcgctgggtgtgccggttccggcgctgccggtcatcccgctggaggataaggcgctgcgtatcgaatcccttcagccgcatatggccaacggcctgatccgcatcagtcacacacatcagacactgattgaccagctgcgccactaccccaaagccgaccacgatgatggcccggactgtctgcacatgctgtggacgctggcggtatcgcgcagcgcaaaatttcagatacacaccccacgcagcaccgggcgtgaccgtggcgggcgttttggttcaggaggatggtaattaatggcacagcttgttgatatttacggacgcccgctgaaacgtgaggcactcaaaaccacgcagtcggtcagagtggcggaacggctgcgcatttatcccgaccacccgtcccgtggtctgaacatcagaaaactgccacgcattctggaagctgccgaacgcggctatcttccggcgcaggcgatgctgtttgcggatatggaagagcgtgatggtcatctgtttgccgagatggaaaagcgcaaaaaagcgttgctgacgctggactggtcggtggagccgccccgcaatgcctcgaaggcagaaaaggagctgactgccgccgtggatgagtggctgcacggcatcccggacatggaggacatcatcctcaacgggatgagcagtgtcggttacggcttcagctgtcaggaaatcagctgggcgttcgtggataaaacgtggttaccggatgcggtgacactgcgaccgcataactggtttattaccctgccggaacacaatgacgaactccggctggatgacggcaatcgtggggaagatggtaaagacggttccgcgctgtggccgttcggctggctggttcaccgttacaacgcccggtcggggttcctgggttcatccggcctgttccgcgtactggtctggccgtatctgttcaaaaactttgcgctgcgtgatatggcagaatttctggagatttacggtcttccggcgcgcattgcctactatgcacagggcaccagtgacgaggaccgggacaacattctcgaagccctggttaatctgggccatgaagcggtggcagccctgccgcagggtaacgaaatcgagttcaaggaagccgcgtccggcgggcccgaggcgttcatgtcgatggtggaatgggcggagcgtaccacctcaaaagtgattctgggcagtacgctgaccagccaggctgacggtaaaacctccaccaacgcgctgggtaatgtgcataacgaggtccggcacgacattctggccgccgatgcgcgccagctgtccggcatgttcagcagcctgatacagatgatggccagcctcaacggctggcaggatatcccgccacgccgtctgccgcgtctggtgtttgatgtgcagcaggaagccgacattaagggcgtggcggacgccgtcaacgtgctggtcaacaatgtggggatgaaggatatccctgtgtcgtgggtacgcaaaaaaaccggtatccccaccccgaaagacggcgaagaggtactggtgccggtggcacagcatctccctgtgcaggcgggcctcagccagctgcgtgagcggctgaatgttgccgcgctcagtcagcaggacaacggggaggacgacccggcacagcgcgccatcgaccgggcagagcttccggcagaggccatcgcgcaggggatgaacgaactggtggccccactggtgcaggccatacaggaaggccgggatgcagacgaggccatgaacgtactggcggaagcatggccggagctgccggatgacacgctgcggcagttgctgacgcaggcattttttgtggcggatatctgggggcgactgaatgccgacagctgacgatgttgacctggggtatgcgtacaccctgaaaccggaagaagcgattaagtatttcgaaagcaagggatacgttatcggcttccgctggcacgatgtgaaggacatcgcacacgcccgggcgttcacggtggcgggcgtgctgaaactggatgtgctgaaggatatccgtgatggcctgacggcggcactggctgacggcgggacgttccgggagtttgctgcacaactggagccgttactggagaaaaaaggctggctgggtaaacggctgattgtggacgaggacaccggcgaactgcacggcagacagctgacgccgcgccggttgcgcacgatatttgataccaatattcagtcgtcatacaacgccggacgttatcagcagcagatggcgaacgtggctgaccggccttattttgagcgcgtggcagtgatggaccttcacacacgcccgaaacacgccgccctgaacggctttaccgcccgggcggatgacccggtctgggagtatttctacgcgcctgacgggtacggatgccgctgccgtatccgggcgcgttcggcgtctgatgtggagaaatatggcctgacggtgcagagcagcgaggggcgactggttgaggttgaacaggaatatggccagccgggccagaccatcagaacaatggggctgaagatgccggacggttccgtgtataccgccgacccgggcttcggatttaatcccggtcgggtggcatggcagccggaactggaaaaatacgattaccgcagcgcccgccagtatgtcaccggcaccctgaccgggccggattttgcccggggactggcgaacgtcagcgaactggatgcgcgccagcgatatccgctggccatccgttcaccggaacaggtcgccgccacgggggccgcacggcagacggtaaaccttacggctgacgttatgaagcgcctcagtgcaacagacacgcccccgaccgccgccgactatgtgctgatgcagcagaccatcgaacgggcggagcatgtcacgcaggacggcaacgcgtggcggtatgcgttacagtctggcgaccgctggtcagtggcgacggttgaggatgacgtgctgacagactgggttatgcaggacaccccggaggcatcatgagcggcggtaaactggatattaagattgatttaagcgcgtataacaccacgctggggaaactgattcgttccgtgaaggaccggcgcgacctgatgacggcacttgcaggctccatgctggatgcggttgagactaactttgaacaacagggtcgcccgaaatggatgggctggagtccggcttatgcgaagcgacgcggccccgggcaaatcctccagaagtccgggcgactggctgccagtatccgctctgcggttaacaataacgaggccacggtcgggacaaacgtccgttacgcccgtatccacaacgaaggcggcgaaatccgccatcaggcacggacgcagaacctgtattttaaacagtacaaaaacggcagcgtcagcacccgctttgtgaaaaagcgcaacagtaattttgtgcagagcgcaacggtcggagcgtatacggtcaacatgcccgcgcgtcccttccttcagcttgtgcaggacgacatcgacgagctggagaacactgcaaaccgctattttgcgcgtgtgattgactgaatggtcacaaacgcgctgtaatcgtctgtgacaacataaacgcctcacggatgaggcattacagcaccgcaccccataaatgccgtcagaatcgtttttaaaagggttttaaaaacggttttatttcccattttatcctttcccgttatggcagggtgctgaacaccctcaacagtaccccgttttctccttccgtcatcatgccgcgtatgaagatgaacattgcggcgttaagcctcgaaatcaccaaagcaactcacagcgaaatccagctgtttccggcaggcgagttcagtgcggtggatggtcgcccacataccgatgaagtcgaaagcggtaaatgggtgctgactgccgaactggccgcgcagcttgtcgcacaggtggcagcccgtaccacgccttttgtcattgattacgaacatcagacgctgcgcgccgtaaacaacggcaagcccgccccggcggcgggctggttcagccaggtggaatggcgtgaaggtgtgggcctgtatgccaccggtgtggagtggacggagaacgcggcggccatgattgccgccggtgagtacaaatttatttcccctgtttttgcctacaacaagcgcggcgaagtgctggagctgttacatgctgcgctgaccaataccccggcgctggacggtatggacgcggtcatgctggctgcggccagtcgtctggcgagtctgtcaactgaaacggagaccacaacggtggatgaagaactgttaaacgatttgctgtccagtctgcgctggatgcttaacctcccggtgacctcaacggcggaagatatcaaaagcgagctgcaaaaggtcgttgacatgatttcgaacggtcagggaacggcggcggcatccgtcagcctgctggccctgctgaatcagaaagacgagcaaatcgccagcctgtcagcaaatgcctatgacccgacgaagcatatccctctgacggcatatgaagaacttcagggacgttatgccgtactggcgcaacagtccggtgaagccgaagccggggcactgattcaggcggcgctgtctgacgggcgactgcttccgacgctggaagactgggcgaaagattacgctcgtcgcgatattaacggttttaaaacctggctggataaaaccaccccgcttgccgcactcagcagcacccagaccggcggcaaaccacccaaaacgccgtcaccggccccggcgcagattaaaaccggcgatgacgtcgatgtcgatatcgccatttgttcaatgatgggcgttgatccagaggatgtcgcccgttacgcaggagacaagtaaatggatcgcaataccccctaccgtgacggcgaactgaacccggtgccggttgccgctgcgaccgaaatttttggcggtcatatggtggccgttaacgcatccggttatgccgttccggccagtgccacggcctcacagattacgctgggcgtgtctgatggctgggcggataacagtaccggcagcgatggcgatgtcaccgttctggtgcgttgcggcaaagattttctgatggtgaacagcacctcagacccggtcacacaatcgcaggtcggcaagctgtgctacgtggaagacagcgtgaccgtggcaaaaaccgacaacagcagcgcccgtcctgtcgcagggaaagtgatcggcatctgtggcgatggcgtctgggttcatttcagttaaggagcaaaacgtgttagtcaacgttaaaaacgtcaaacagatttttatcaatctgaaggccaccttccagaaagccttcgaccagtcgccaactgactggcagaaggtggcaatggaagtgccatcaaacggcaaggaaaacgactacagctggttaagtcgtttcccgaaaatgcgcgagtggattggtgacaaggtcgtcaaatcactggcggcatttaactacaccatccgtaacaaggactgggaagccacggttgaagtcgatcgtaacgacatcgaggacgaccagattatgggctatgcccttcaggcgaaaggagccggacagtcggcagcagagctaccggcagatattgtggcgtcccttatcagtaacggttttaccaatctctgttatgacggtcagccgttctttgataccgaccacctggtcgccggtaaatcggtgtccaacaaaggcaccaaaaaactcaaagttggctcgcttgccgaggcgaaagcctcctacggtgccgcccgtacggccatgcgtagtctgaaagatgacgaaggcgcatccctcaaaattcgcccgaatctgctggttgtgccaccggcgctggaggatgacgcgaactacctgatgaccgccgagaagttcccggacggcacgccgaacccgtaccgcaataccgccgaagtgctggtgatgccggagctggcgtcggattctgcgtggttcctgtttgacaccaccaaaccggtgaaaccgctgatttatcagctgcgtaaaaagcctgtttttgtggagcagacggactacaacagcgacaacgtgttcaagcgtaagaagttcctgtttggtgccgaagcgcgctgtaacggcggttacggcttctggcagatggcatttggttcagatggtacgacggagtaatgcatggaaaaggtgattgaaattaccgcccgccgtgagggttttcgccgctgcggtgtggcacacagcgcaaccacgaaggcatggcctgtggatgcgttcaccccggaacagctggcggtgctgaaggcggaccccatgctgattgtggtggagcgtgataaagcgtccggccagaacgacgcggaccaaagtgatgaactggtcgcacaactggatgccgaacgccagaaagtcagcgaactgacggcgcaactggaagaagaacgccagaaagtcagtgaactgaccgcacagctgaacgccgcacagaaaacacaaaaagcggacaaaaaggagaagtaacccatgtcttacgccacaccggaacagttcatcagggcgttcagtgaacgagaggcacgcacactgacggatgaagacatgacgggattcatcgacgaagaaaagctggcctccgcgcttgcgcgcgccagtgcccagattgatggctatctggtggggcgttaccggaccccgtggcctgacagcccggggattctggtgggttactgctgcgatatcgcccgttaccacctggcgaccgattaccgtatctgctcagaagaaattcagatgcgctaccgggatgccatccgctttctggagaaagtcgcggcaggacaagtcaacctcggacgggatacgtccggcagcgtgatccagtcatcgtcacaggtgcgtatccgctccggctcccgtcagttcgggcgtgagtccacgcggggaggtgcattctgattactgacattgaacgggcgctggttgagcgtctgcgctgtggtctggggcatatggtgcaggatgtccgcacctatgccggtgaactggatgaagaccctggccggattgttcgcagccttccggcagcctgggtgacgttcggcggcatcgtgaaaaccgaacgctattccacgtcgcgccggaaatacattgccaccggacgctttgtggttgtggtgggtgattacaacacccgcagcgaacagagcgccagacagggaggctctgtccgggatgaagtcgggacaaaccagctggttgaatccgtccgtcgcctgctgaccggtcaggatttggggctggagattgattatttcgaacccgggcgggtcaggacgctgtttaacaccggcgtggcagagcgggcaatgtccgtgtttgcctgtgagttcgatacccgctgggtggagcacgcgctggagaacggcaaatggccggagcgtggcgcagaagcggaccgcctcttcaaccgctaccacggcaggctgtcagaccctgacccggatttactgcgaattggtacgcaatacggcgcagatatctgtggtctggatgaattaagagagcaacagcatgaacaaaatgaaggttaaggcggctcacgggatgaagttcccgatggaggataacgcccggaaatacatcaccacggaagcggtgaccgttgagaataccgcttattaccggcgcgccgttcaggacggtgacctgattctggtgaaggatgaacctgaagccaccgaggtggctgaacaggacgccgtgcaggtaaaagcgaaggtgaagaaagagaaacaggtgggctccgatgagtgaaattcagtttgacaccatttcgggcggcatccgtaagcccggtgtgcattttgagtttaatacccgactggccgttaacacgctgccgggtaatgaacagcgtgttctggtgattggtccgatgctgtcaggcggcaccgccacgcccctgaatgccgtctccgtgtattccgaagacgaagcggatttgtatttcggggccggttcgctggccgctgcaatggcgcgcgcggccattaatgccaacagctatctgcaactggatgttatcggtattgcagacagtggcgcaggaaaggcggcaaccggcgcagttaccgtcagtggcacggcaaccagcagcggcacgctgtcggtatgggttgccggtgagcaggtcacggtggatgtggaaaccggtgatgaaccgtcgaaaatcattccggcactggtggaagcaatgacgcagacgccatcgcttctggtcacgggggaatacaaatcggaagcctctcagctgacggtgaccacccggaccaaaggggcctggggggatgatatcaccctgtcagcgtccaccacggcaggcggtctgaccgtgagcgccacgccgatggcgaacggcgaaatggatccggatattcagcccgcactggatgcggtctttgccgccggtcacaacattctgatttgtccgttcagtaccacgccagcccttgctgccctgaagcagcatctggagaaaaccgggaacgcgatggaacagcgcggcgcgattggctgtgcgggctggacgggtagtctcggaaacgggatcaccctggcagccggtgtgaacagcgggcgcgtgtccgtcccctggtatcgcggctccgtgaagctgccagcggtgctggctgccatctacggcgctgtgatggcgggcgaggaagacccggcgcgtccgctgaactcgctggcgctgtccgggctggatgtggtcgccatgtcacagcgtgaaagccgtaacgagcaggaaaacgccctgcataacggcctgacaccggttgaggttggcccgggtaatacggtgcagattgtgcgtgcagtcagtacctacacggtgaacgcgcagggcgtggctgatgtctcgctactggatatcacgtccatcagaacgctggattacacccgtaaggcgtgccgcgaacgtatcagcctccgcttcccgcgtgaaaaactcagcacccgcactatcgcaaaagtggaaagtgaactgtatgacgtgctgatcaagctggaggaagcggaaattctggagaacgtggaagcgaacaaggcaaagctgcgcgttcagcgaaacgggaaagatgcaaaccgtctcgactgcgtggttccggcggatgtggttaacggcctgcacgtgtttgccggtcgcatcgacatgattttgtaaggagcgcggtaaatgtccattaaagaatatgtcggctcgattgtgctggaggtggacagccaggaaatcgagatcaccgacttcgatgttcagatcaacaccggacgaaagctggtcaagaccatgaacaaaaccggcagggcaaaaggctttgcccgtggcattgccacttacgatatttcagtttcggcggttatccctgataccaacgagccggactgggaaaatctggaaggtgtgaaaatctcaatttatccgctcagcaacagcggtaagcgcacctcctatctggactgcttcactgttgaagtgggtgagaaatacaccgtcgacagtgaagcgaaaattgatatcaaaatggctgcactcaggaaggtgacaggatgactttgattaatacacagaccggcgaactgtctgatggcgtggtatttaacggcaccgttcataaaaactttgagctgcgtctgccggtcatgcgtgataacgggcaggcactggaagaaaccgaagaacgctttcagacggtggacggcttcgcggcagattattactaccgttgtgcagtgatggcggcaacgctggtccgtcttggggatatcccgcaggaagaactgacggcggatctgttgcacgacaacatgacgccggacgattttaatattctgctggcatcacgcaacgtcctgaaggtaaagcggaacggcgggaatcccggctcgccggactccggctcgcagtcctcatcctcgggcgctacggaataaccgaagagcaaatcatgaccatgagccgtcccgagctggacggctggcttgccgccgttgacaggctgaacggcggcggctcaggaaggaaggacacctcacagaccacccgccagtcatttaaatccctcagaaagaaacgcagaaaaggtaagcagaaaaatggccggtaatttcaaagttggcatgaccctgactgcgaaggacgaagcctcgcaggtcctggaaaagggacaaaaacaggttatcaaagccaccgaaggtgtaacaaaggcaacccggaaagcaggcgcagagcagaagcgtaccgagcaggaaagcattaacagcacgaaaaaggccgcaaaagagatacagcgtgccgcccgtgcccgggaaacgctcggtattcgtgcagaacgcgagatccggcgtgaaatttatctgacggttgccagttataaccgtctggcccgcgccggttttgaatctgcgcaggagcaggagcgcgccatgcaggccacccgggaaaaagcccgggcactcaagcgcgaactggatggcgttactcaggctcagatgaagatggcgaaaacgcctgttatccctgaacaggggcgttttgcgcgtgcagctgcatttggcaggaatgccgtgacaacaggcgctggtatcgcagcaggtgcggctattatggcgcagccggtcaaaaagcagatgagctacgaacgccagctggcaatgatggccaataccgctttcagtgatggcggcctggaggggcgcagagctggtcttgagcagatgaaaagcagcatccgtaacgcagtgacctatggtggcggtacgaaagaggatgcagccgaaacactggatgccttgctgaaagacggcatttcatttgaaacagccagtaagtggctgcccgaactgatgaaatacgccacggcttcaggcgcatctgcaacagacctggctaaggtgatgattaagggcaaaaagacctttggattcagggatgaagatatttccaccgttctgaatatggcgattgcagcgggcaaagaaggcagctttgaactgaacgacatggcccgctggttatcccagcaaatgggcgctgcgtcagctgcggggatgaaaggcaaggatgatttcgtcaagattctggcgctgaatgaagctgccgccatcacggcgggaagcagtgatgaagccggaaataacgtggttaacctgctggcaaaactgaccagtaaggatattgaaacagcggctgcggggataaattacaacggtaagggaatcgacttttccggtacgctgactgaagcacgtgagaatggacttaatccgatagacgcgctgtccagcctgatagacaaaatcgttgccagcgataaacgctatcaggagctgcaaaagaaactggcctccgcccgggataaaggtgagcagacggctgtttatgattcgatggcaacactccttgaaggctttggtgtcggaaagctgattgcagaccgtcaggcgttgatggcgttgttagcctaccgtaacaaccctgaataccggaaaaaggttgaagacgcgattaatcagcagcgcaccctgccggaaggtcagcgcgcgggtgatgtggattttaaattcatatcagatacgaatgattttaaaaccgaacaggctaaaaacacgcttgaattttcacaaatggacagcgtgaaaaagctggcggatgcatccggtactgtggccgatgccataagctgggcgggtgaaaaatttccgggactgaccacagcagtcgtgggtgccacgaccgccattgaagcgatgaccgcagcagccctgacatgggccgggatcaaaatcctgaccgggggtaaacccggtggcaaggctggcgaggttgtcggtgatgtcattgaaaacacggtcaaaaaaggcaaaggatttaaattccccggcattgccggtggcctgctttctttcggtagcaccgttacggcactggccactgcaaccagcccggaagaagacgccgccgtcgaaggaagcgaggagcgctggaaaaatatacgggctaaatatcctcagtggctgattgatgctgcccgtgaaaaatatcagccgtggtggcagtttggcgaaggttactcaacagaaaacgagaaatggatccagcagtatcttgacgaactgaaaaaaaccggggttatcgccggtgattctctgccaacaccagaacaagtccgacagcaagccggaatggcagcgtctgaaacggcatcaaagcaacccggacgcatcacccagccggaatacctcacgcactggggaccacctgccagccccattaatttcaccacacaactggtgctcgatggtcaggtcgtggcggaagcggtgaataaatacaaccttcaggacggcaacagaggcacgggaggaacttactgatgggctgggctgaaaacctgcaaaacgcctcctttcgtggcgtgcagtttgatgtactgaacacggatgaacaaatcagccgcgaccatgcggtctatgaatacccgtttgttgacggggcggatttgcacgacctcgggcgcaaggcgcgaccgttccgcatgacggcgttcctgtggggggagtattacgaatataaactcgaaaagctgatcgccgccctggacgaaggcggcgatggtgagctgattcacccggtttatggctccgttccgtcggtgattgtgaccggctacagcattcgccatgacgcagaaagcccggacagctgcaccatcgacatgagctttctggagaaccgcaccggcagcgcgttgttcagcaccccgttaccggagctgtttgcacagcagttatttgaagaactggataagttactggcacagttaagcgaattatttgacgctgttacggcccctttaaagaccattaacagcgtgattaaaaaaatccagacagtgcgcgccacactggtaaataccctgctgacgttcaaaagcgattttctctcatccatcgacaatatgatgtcgctggccagcgaacccgggaaatttattggcgggctggcagaggtgctggaaatccacacgtcagatgtcgggcacgcggtgccggtgctggagcgtactgattccgccaccacgaccggactgaccggggaagacagcgtcgccagttctgcgacagtgatgacctgctggaatgaggtgacggcagatatggatgagctggtcgcgctgccggtcgcactggtcagcggtgataaaacgccgtctgtggcacttccgccggatgcgtccgtggaagacgtgcaggacgtgaaagcggcttatgcggttctggcagcctcagagctggccagcgtggcgacggcgatactgtccgatgaggcccagtcagaacagcttataccggcagatatcgggcgactggtcggggatgtgcgcacccgcttacaggcagccatcacgctgttccgtgaacgctatgaaagcgaacgcgaacggataaccgaaaccgcatcaccactggggctgatgtacccggaaatcattcagagcatgaagaacgtggcggcatccgtgcaggatgtcggcctgctggttctgtcacgccgcccaccgctgacgcagaaacaggtgcaggcggacagctgtctgctgttgctggcgtggcagtggtacggtgattacagccgtgcggcagagctgcaacgtctgaacccgcagctgcgtgacccgaacaacataaccgccgggatggtgattaatgcctacgcaaaataacgacgacaaaatcagtctggtcattgccggaaggtcgcattctgactggagcagttaccgtattgacagtgatttcctgaaagctgccgacggctggcagcttcagttgggactgcctgaaaaggtgttcccggcggatatcgtccggggtgcgccagtccggttgcaggtgggagacgaaacggtgctcagtggtcgcgtggacagcgtgcgccgcagtgtatcccgtcagagctgcacgctgacgctgtccgggcgtgatgatgccgccattctggtggactgtgccgcgccggtgttcagcgccaaccagctgacactggacgaggtcatcgacaggatagtcagaccgctggggatacagcgcattcgtattcaggcgtccggtgtgtcacgtaatgacaaggtcgttatagagccggggatgcgtgcgtgggatgcactggctaaagctgccgccggtcgcggcttatggccgtggtttgagcctgacgggacgctggttgtgggtggccctgactacaccaccacgccggtggatacgctgattctgaagctggacggcaccgggaacaacgtgatggagctggatgatacccggtccattaacggctgcttctccgaacttacagtgctggcacagagccacgcccgccgcgcagacagcaaaaagcagctggccacagtgccactggatatctggaacgaggacggcagcgtgcgcacattatccgggcgggacggcggtaatacggacaatggccagacaggcattcataacatgaaagctgtggccaccgaccccaccgtggattattaccgcccgcagattatcactcagggtgacaccagcaacctggagcaggtgaactggcgcgccaaaaaaatgatgagtgatgcccgtctgtcggggctggatatcgtcgcactggttgcaggtcatcgcacggcggacggtgtcctgtggcagcccggccagcgtgtgcggattgtcagcgaaccccacggcatcgacgccatctttttcctgatggggcgtgagttcagcggaggccgtaacgggaagacaacccggctccgatttaaggaggacggcgtgtggatacctgacgccttcccgcgcgagaagaaacgccatcaccgcaggggcaaaaagaaaaaagaggtcgccattgttaaggtctgggagaaatgatgtgggacaaagttaatcagcgcgtacagcaggcactggccgccgttcgccaggcattcagggtggtgaccggtacggtggacagttcgaccaaagtacagttgcttcagctgaacgggctggcaggcgaacagctggatggtgcggagtatttccagcattacggcctcaccacatctccgccacccggctcgatgggtattgccgttccgctgaacggcaatacctcccataccgtcgtcgtggccacagagcacggcgcatatcgcctgacggaactgaaacccggcgaggtggccctgtataccgatgaaggcgcgaaaatcgtactgaaacgcgggcgggttgttgaaacggactgtgacgtttaccgggtgaaatgcaaacgctatgaggttgaggcagaggaaagtgccgcattcacgacaccgttactgacggccagcgataagctgacggtggaaggtaaaatcaccggcaacggtggcatggccatcagtgggggcaagaaatacgccgccacctttgaaggcaacatcaaccatgtgggtggtgtgattacctccgttgacgtcaccgttaatggcgttaaaatcggaacgcataaacacgatacccctcacggcatatctggtctgccgcataattaagtgctgaaccccctcacctgattctgacctgtccatgctgccagactggcggcatggaccagacgatttcacctgcaaccggcgactacgaacgccgccggatttatacactccataacgcggtttatctgcgactggcgacaccgcttggcagttactgggcggatgcgtcgctggggtcacgcctgcacgaactgaagcgggaaaaagacgtttcccgtgttcacaggctggcggcgcagtatgccagccaggcacttcagcccctgcttgatgacgggcgggcaaaatccattaccgttgacacgaaagcgggccagcgcggctggttgttgctgttaatcactgtcacggataacgcgggcacaccgcagacgtttgaacaccctgtgaggattatgtaatgccgtttcctgttccgggcgttgctgaaaacacagaacgccagctacgtgatatcgctaacgccctgccgggagaaaccatcgacaccggcgctgacagcgattaccgcattcgtgcaaatgccgtatccggcgtggcggacgggctttatatgcatcagggatggatcctccgtcaggtgtttcctgacacggcagaccctgaatatctggagctgcactgccgtacgcgcaatgtttttcgtaaaaaagcaacggcctcatccggtccggtagtgattaccggcacacccggtaagacgctgccagccggtgcggaaattcgtggtgaaggtgtcagcgtgaccaccacagcagactgcaccgtcggcgatgaaggcagtgcagaggtgacggtaaaaagctccgccacgggtgcacagacgaacgcatccgcaacgcagacggcaacgctggtcagcccgccggaaggcatcaacagcacggtgacgattaaatccctgaccggcggaacggacagggaaagcgacgccgacctgctggcgcgttatctggatattctgcgcaggccgcccgctggcggtaacaaatatgattacaaacgctgggcgctggaagtggatggcgttacgtctgcgtatgtggagccgttgcgtcgtggactggggacggttgatgtggccattacgtcagccaatgacctcccttcgcaggaactgattaatgccgtgctggcacatattgaggaagtccgcccggtcacagcgaaagacacgatggtactggccccgacgaaaaaagccgttgatttcgttgtccgggtaaaaaccagcggcctgaccgttgagcagataaaaccgcagataactgacgttatcacggattttatgaaccggctggagccggggcaggaattaattatttcacaactggaaacccagatttcattaatttccggtgtcagtgaccggcgaatcattacgccagcagacaatgtaaaagccattattaacgcgtcaacgtgggaatggctgcgtccgggaaatattgatattcagtcctttccgcgtgaggggtgattcatgaatatggtcgatttatttcgcgccatgctgccgcctgtcagttatgaccagaacggaaaatatatttccgcagaactgatggccgaggctaacgtcatggaggccgtgaaggcatcagcggcgagtgttctggcacaaatcaccccattgcaggcatcgatgacgctgtctgactgggagcgcgtgtacggtgttgtcccccgtgaaggtgccacgcaacaggagaggcggcagaacatccaggtcaggatggctgccactggcgggctgtcaattccttactttaagagtcttgccgccagcctgggctacaccatcaccattacggagccgcgagcgttccgggtggggataaatcgctgcggtgaccgtctgctgataccggaaatccgctgggtgtggcaggtcaatgttatcgggacaaaaacgccggtctaccgtttcagaacgggggcatcggcaaccggcgaaccgctgacggcctttggtgaatccattttagaaaacacgtttaaagaccttaaaccggcttttacagactgttatttcacatatgaggtggaggaataatgcagaatttaatgcctccggtgaatacgccggataagctatttcatgatggtgaccccactcagggaattgagggaaccatcgtttacgccgaatatatgaataatcatcaggcggcaacgcgcgatttgcagcaggaggtgattaacgtccttaaagaggctggcgtaaccccggatccgaaaaaacagaatcaactggttgaggcgctggccttatatgtcgggaaaaaagttcctgacgcatcattaacgaagaagggtatcgttcagctcagtagtgcaacagacagtgattcagaagaactggctgccaccccaaaggcaataaaggcgttagcaaaaaaaattgctgatttacagggtacggctttaccggtcgggacaccaatcccgtggccatctgattctgtgccatccggttatgccttaatgcaggggcaaagttttgataaaggctcttaccctaaacttgcggttgcctatccgtccggggttattcctgatatgcgcggctggactatcaagggtaagcctgccagtggtcgtgccgtattgtctcaggaacaggatggcatcaagtcgcatacccacagtgccagtgcgtcaaataccgatttaggaacgaaaacgacaagttcatttgactacggcaccaagacagtcagcacgtttaaccacggcacaaaatcaacaaataacacaggaaatcatacgcacagtgtcggtggtgtttatggcggcgactctatcggcggaaaacaacgtgtgcaggcgtcagggagcaatcagatttccagtactgccggagcacatgctcatactgtcgatattggtcagcataaccacaccgtaggtattggtgcccatgcacacactgtggcattgggtgcgcacgggcacaccatcacggtaaatccaacaggcaataccgaaaacaccgtcaaaaacattgcatataactatattgtgaggctggcataatgactttcaaaatgagtgcagaagcacaaaccattcgtgtatttaattatctcgatggcacaaatgaatttattggcgaaagcgacgcatatattccacctcatacaggtctgccagctaattcaacagatattgcgcctcctgatattccggcgggttttgctgccgtgtttaatgctgatgaaatgaaatggcatctgatggaagaccaccgagggaaaacggtttattcaacagaaaccggagtagctgtaacagtgtctgaactgggaagccttcctgaaaatgtgacttctgtttctcctgatggcgaataccaacgctggaatggcagtcagtgggtgacagatgaagaagccaggcgtaatgcgctgataaatcaggcggcagagaagaaagcgggtctgcttaaacagatgggagagcaaatcgccgttttacaggatgccgttgattttggtgaagcgacgccagaagaacaggaacagctgacagccctcaggaaattacgaataaagttaaatcgcattcaaccggaaaacgcgccagatattgactggtcagactttgaataaatcagacagccgcccgcaggcggctttttatcattcagaggttttatgtctgtattaatctcaggcgcgcttattaatggcgctggcgttccgatggcggaatgcaaaatttatttagatgcactggttaataccagtgaggtggtcactgaatcattcgcggttattgaaaccgatgcggcgggacagtatgcctttgaagcgcaaaaaggcaaatacaccgtacacatcaagcaaaagaacggccccaagtgctgcgtgggtgatatcgctgtatacgatgactcaaagcccggcacactgaatgattttctgaccgcccccaatgaaggcgacctcaaacccgacgtggtgaaacgctttgaggaaatggtggcgcaggcgcagcagagcgcggaagcggcagcggaaagcgaacgacaggccgggcaacacgcagctgatgcgcagaagattaagggtgattgccagacgctggcagataatgttcagcagaatacaaatgctgtggaggaaaacacgcagcgcgttgaacagctggcctcagaagttgagctgaacgccgggcaggtgcagcagggcgtgcagaatgttactgatgcggtaaaaaaggcgcagcaggcagcaaagaattctgctgacagtgccactgactcaaaaaacagtgctgacaacgccgccctgagcgaacagaacgcacaaaaacacgcgcagaaagctgaacaacatgagcagcagactaaacaatatgcgcaggatgcagcgaccgccgcagaatcagcagagaacgccaaaggcgaaattgacgaaattctggatggcggctatctcaagataaaaaacaactttcaggaaattgttgatgctggcccctcagcactggctcaggcccaatggaatttacagatttccggggtgaaaaataaacaggtaattgccaccccttatacatggccatccagaactgagtatgaacaaagggtgcatctgccactcgccggggcttacggatttggctacacgtttgaagacaaaagccagggacgtataaaccttagcgaaagttacaccggctcctggtggtcacagtgggtaaagccggggcgttattacgttacaaccagtgataaacaatatctgacaccagacgggtacacgtacggggttgttgatgtgctgtggcttaacggtaacgcatataatgacgcttcgcaggttcttaaaatactggctttttacgatggtgacggatgcctgcatatcggcaagcgcgttggtcagagcaactggtcaataagctggcgcaagctgacatcgctccctgatgtcagggccatgctgtattcatatatttataataattacaacagagaatggcgtgacccggagctgggaggtttaattctggcgtcataccagggaaccgcagacggcgacacaaatataaaagtatcccgtggtcagacttatcccggctcacgacttgcacctgtggcgatagaatgccagttcactccatccggtacgtatgccgcaacaccgcgattccatattaccggctgcaagagcaaatcactccccggaacttatatttcactgtctggagcacccacaacatacagcgaccaggcttttgtggcgctattcatgaggattgcatgatgcagataaaagaaattaccagcccccactacaccgaatccggtgcgattgactgcgaagttttatttgaagggatggatgaagccgttccgtacacagccacaccagaagacacagcaacaacaggccagcaaatttggcaggaactgcaaagcggcaaatggggcgagattgccccgttcaccgcatcacctgaacttatcgcagcagcaaaggacgccaaaaaacgggaaattgaggcatggcgcacagaacaggaagcgcagccattcacgttcgaatggaacggccgcacatggaacgctggccccgactcaatggcccgtctttatcctgtggtaatggctgcaaaatctgatacggcacgaactgcccttgcgtggggtgacgccgataatcaacaggtgaaactgtcgatgccggaactggaagaactggcagccgcgatggcgcaggcgcaggttgagcgcaatgacgagatttatcaacgccagcgtgagatgaaggaggaactgaataacctggatgatttacgctcaatcagagcgatgacgattagcagcagttagcggtcaattctggactttttgggcgcacctgaaccgtccagaattgcgcgtcaatcagtccagaaaaaaacgcgaagttacagatgatcagcgacagaggtacgcttatcgcgtacggacgttatcccgacacctttttaccagaccagacggactccgttatcaaggaagttattctgacgctggttcttgggttgacgcacgcacaaaacgtggtgctggaagttgatccggacagggccattattactcaggaaatcggagacagacgctatctgcaacgaaaaaagaatctttcggatgtggaagacaaggatgaggctgttgaaaacctcggattaaaacccacggtggacaaggcaaaaaatgccgttcagcgtgatggtgacaccatgaccggggaactgaaaatccgtggtgttaatgcgctgaggattttcaacgaggcttttggcctgatttttcgtcgttcagaagattacctgcacttcattcccacgcaggaagaccatggagaaaatggtgatattggcccactgcggcccatttccattaacctgcgccagggcgatgtggttattggtgacaggattggcatcggtaatgagaacaatctgggtgaaaaatcactcacgctctgtgatagcaataccggttttaagtggggcggacgcggtgttattaatgtgtttgcagagggacacaacgtctttcgttttacaaaaaacggtgtgctggcattagaaaatctctcgaccggcaatttaagaaagttcacgctgtcgtgtgacagttcttccacgaagagtgcaagatttaatctatggggaaattcctcaaggcctgttgttgcagagcttggtgatgattctggctggcatttttacagtcagaggaatacggataacagcataacgtttgccgtaaacgggcagatggttccatcaaactacggaaattttgatacccgttaccagaccagaacaggtggtgtgcaggatgtgcgtctgggaggtgccattggtattggacgcggaggaaatgcgccatcaggtcatttactgagtggtgttgatggcggtgaaagtgtggactgggccaatgcacgcccggtgcaggttctgattaatggtgtctggcgaaatgtagcgagtttgtaatcatgatgcacttaaaaaatcttacggcacaaaaccctaaaacaattgagcaataccagctggcacgacagcataaatttttattgtggctgttctccgatgatggtcaggaatggcacgaagcccaggaaaaatttcagccagacactctgaaagttatttatgttgaaactggcgaagtggtctgggtcggaaaagacatcacctcaatctgcccggaaaataaaagtgtgattgagttgccggatattaccgctaatcgtcgcattgaggcgtcgggatactggttctaccgcaatgatgaatttgtttttgactacaaacttaaagcggaagatgagcgtgatgcactgttaaaacaggtcagcatcatgaccagcgaatgggaaaaagacctgctgctgggattaatcagtgacgaagacagggaaaagctcaaagcgtaccgcatttacgcgaaatcgctgcaggcgatggatttcagcgctattacggataagaccacttacaacaatattagctggcctgagcagccacaaaatacctgaaaaagaagttaatcatctgaccgcctgagggcggtttttttatgggagaaatgtatgtccggattacatggtgttgaaaccattgaactgacgacaggcacggttgccgtgcaaaccatctccacggcagtgattggcctggtggggacagcgccggacgcctctggtggtgtgtgcgcttccggcacagccggttcctggctgctgggaacggcgctggatttcacggcgaaacaggaaggtcgggtcggtaataagatttcggttgttgccgtggctgccacggaacaaaacgcgcagacagtggcctcgctgaaaggtacgaccctgacgataacactggggacggacgaacacagccaggttaacgccacggtggattgtgtgactgaagtggtgaatgcgctgggggattcgcctgtgacggcggctgccagcaccctgaatgcaggaggcgctgaaaataaagtggtgtcgccgttcagcctgacgttatccggcggggaagatgaggcgttcccggtcaacacaccggtggtggtggcaggggccattactcaggcggggaaactgggcacagccggaacattatacccggccctgcgtgatatttttgaccagactggtgcgctggtgattgtggtgcgcgcagaaagtaaagcaaaggcgaaagaggccgaacagcgtgcggcggtgattcaggccatggaggcgctgacagaaagtaagggcgtgacaggctatcaaccgcgcatcctcattgccacggggtacagtgaggatgatggcgtggcaaaggcgctggaaacgtatgccgcgaagttgcgggctgtggcctatattgactcgccctcaatggcaacgccgcaggatgtggttcagcggcgcgcgtcatttggcggacgtgtggagctgctgcgtccgcgcgtgtcagtgacggatgacagcgggcaaacggtatttcgtccatattcggctcgtgctgccgggctgcgtgcccgtattgattatgaaaaagggtggtggtggtccaaatcaaaccaggacgtgatgaatatcaccggtctggagcaggtggatacgtttattctcggggagcagaactgcacggcaaacctgctgaacatggaaaatatctccaccattattcgccatgacggttttaaacactggggtaaccgtctgtgcacatcccacagtcagtggcgctttgaaccggtacgtcgcactgcagatgtgattgaggacagtatccaggaggccatgttgccttatgtcgatcgcccgcttgatcgggatgtggcagacgacattcttggcagcattaatgcctatatgcgtcagcttaaaaatctgggtgcgatccacggtggcagcgcctggctgaatgatgaactgaatacagcagaaaccctggcggcagggcagttgtatatcgattatgactttgggccgaagtcaccactggagcgcctgacactgcgggcaatgattaacaataaactggcgctggaggaactgacggtatgattacgggtgaaaaaaaactgttgcgtgcatgggcgttatttcttcctggcgggatccgccttcagggtgcgcatgaatacacgccgcctgccattaatatcacgacagtggatatcaaaaccggcgcaatggatgcaccggtggcagtggatgacggcatggaagcgctgacctgttcgtttaagatttatggttatgatgttgccatgcttacgctgctgggattgcaggccgggctttattcgccggagattgttgtgcgccaggcttatcgggtgggaaatgcgaccagcggacaggtggaaaccctgcaggggatgatcaccagtatcacgccggatgcacgtccggcaacatcacaggcagaggcttcggtgacagtggaaatgtcactgagttattaccgtcaggctgtcgatggcctggaaaccatctgcattattccggaggaatttgtacgtcgtattaacggcgttaatgttctgtcggatctgaaaaaaatcatccgggtttaatccggggatctgccattcaggcggctcaggccgccttttctttttttaggagatgcttatgtcggaaaaaaacagtgttcctgccagctgcgtggaaattgtgttatccgtgccgtatgtcaccgcatcaggacagacgatcacgcacgtcaccatgcgtgcgcccaccgtccgcgatcgtctgttgcatcgccggagtaccaaaccggaagcagaggctgatctggatatgattgccggtctgtgcgggatggacgcggcagacatgatgaacatggaagcgtgtgattacctggccctggagcggcagtttaatgtttttttgctgccgccggtccggcggaagaagaaaacatcctgatggcgatacggcgtgccggagtatggttcgggtggtcacccggagatgtgatggcactgccgtatgaggattttgtggcaataatgctggcagaggcggaagagaggaagcagtgttatggcaacggtgggcgataacctcagagcgaatatccggatcggcggcactattgacccgtcgtggaaaaaatcgacagaggggctgaagcgaggtctggctggtgcgacacaggaagtggcacgcctgacgcgtcagcaggatgtactgaagcgaaaaattcaggctggcgtactggcagggcaggatattaccgatctgcgaaagcagtatgaaaagctgaaacggaaaatcaatgatgctgcagcggagcaggagcgatttaatcgccagcttgaacgggcagagcgcctggaacgctggaaaggacgggcagggacatttcttaaaaccggactcgggctctctgttggttccgggctgacgctggcagcaggtgccagcgcggtactgaaccggaattcggaaacggcagagcgggcagggatagcccggagttatggggtggattacgaaacctatgcggcgtgggattcactgggccgtcagatggggttaaacggcgaaaacattggtgatctgtttgaggaataccggaacaaggtttttgacgatgataatggtgccacggacaaaggagccattcaggaggtattcggtaaactggggctgaaagcgggcgtaatggccggaaaaaacaaccaggaacaggtcgaatttttgtttgatcgcttactgcaggtggagaatgagcagcaggcggcggggatggcagatgcgctgtttgggggggaggccaataaaattctgacctggatgcgtctgtcaggaaaaaccttccgggagcttatcagtgagcagaaacgctataacctggtgacaaaagaaggggctgatggcgcagttcaggggcatgtggcgctgtcaaatctccgtaatgttttgagttcttccattgatgaaatcagcggacaactgggtaatgagcttgcgccacgtatccaacaggtgacggatgatcttgcggcttggtttaaggagggtggccttgagaagattcaggcatttatccttgatgatgccctgccggcgttgatcgatttgtccgagtggatgtggaaattcggaaaagttcttgcaggaataacgcagaaagccattgagtgggggctggcggatgattcgcgggaggaccggcgagaggtgctggaatatctggcaaaaatgggttcgcctgagctggcgagagcggtggcgcagaaaaacggtcagggtgaatggtttgatgaactgctcaggaaaaatccggagctgacgaaacaggttgtacaggcttataaagacacccgcggttatctcccctggaaccatgacgataaaaagtttgatgcatttctcgatcctttgctgggaccgaaggaagaacctgattttgatggggcgagggagcgtgttcgcgctgcccgcgatcaactacagaaaactcgtcaggaacccgcatcgggggaggctgaccgcctttcagcgcttcagcatacccccggcagtatcagccgggtggaagtaaaacccacgtatcagatacgggcggaatttaacatcacccagaagcccggcgaggatgccggacaactggcagacagggtaacgaaaaatctgggagatattaattttggtcagcgttcccgcatgaccgatggtgatgcattctgggggtgaacatggtggatttgctgggctggggcgtaaaccggcttgaacgtgaagcatgggatgcggtgggttcattaacggatgtcgcctcccgcgtcatgctgtcgtttggtgagtttgaattcagtattgatacggcagcctataacgccatgaagcgcactatggaatggcgatgggatgaacagcagcttatcggaaaaaacgacctgctgcagtataccggtaagggggccagaacaataacccttgaaggcatggtgcatgcgggatttcgtgacggtgtgggaatggatgcccttgatacgctggttcagatggtggatgacaatccggccccgcagttactggtctcaagtacaggcgatgtgatggggtatttcgtggcaaccgcctattcagataacaccacgtcctttcttcccggcggggcgccaaagaacaaaacgttcacactggagctgaaatactatggcgaaaaactggcggaccactgacggcgatatgctggatgacatctgtcagagacactatggcagtgccgggcttaaccagtcactggcggcggtactggaagccaatcccgggctggctgaccttggtccggtctatccgtcgggagtggaaatcgtgttgccggactgggtatatgaaccggaagtgaaggagacgtttcagttatgggactgaatgaatatcagccggatttcagcctgacagcggaaggccaggatatcacgaaggccctgaaacgggggctggctgaactgcgatataccgataatggtgcagccacaaagcggtccgatgaactgatgataacgctgttcagcgagacgctggcgttaccaccgaaaggcgcggtgctaacgctgggactggggttcaacggaaatctggtcaataaaggcagttttaccgtctgtcaggtggcaagcggtggtcctccccgccggctcaccatttatgccaccgcagcccccatgaatgcgtcaaaacatggcgcagacgtgaccgcactgaaaacccgggctttcagcgatatcacactgggcgacctggtgaacaccatcgccactgaaaataatctggtggcgcgcgtctcatcggtgcttgctgatattcatatcccgtgggtgatgcagtcatcagaatctgatgctgccctcttgtcccgcattgcaggtatgtacggcgccaccagtaaaccgaccaatggctactggttatttctggaatacggggcatcacagagtacggggggcagaaatgcgcctgagataaccattacaccgggtatggtatcagactgggattatcgtgaaggtgagcgacagggcgctgcgggtggtgcgaagggggataaaaagagcgggaaagttggggtccggtattttgatgcccgtgacggacgcacacgtgaagttaaagttgacgtggagtcaacagataagcggcatccgtttacccagcctgaccagggcaccgcaaaacactgtgcagagtcgaaggttaaacgtgtgcagaaagtcggacgccagatgacgataacgttgccctgcaggccggaactgctgaaagcaggggcggagatgcgttttgtcacgcagggatttggtgtgcgtgaggaccatcactggcaggctgagtctgtggagttttcactggtaccgggacagggatttacgctgaatctgtcactgaccacggatatttctgcaaaggggaaagccagtggcaagaaaaaaggcgtcaattattttggttaatgttttctgaatcaggaaataaacatgtctgtattaatttcgggtgtgctgacggatggtgcgggactccccatgtccggataccatattattctgaaagcccgacagaatacatccgcagtggtcatgagaacggtggcaacagtggtgacggggccggcaggagaatatgcatttgaggctcagaccggaagatatgacgtttatcttcggtcatgtattgaaagagaatattgtgtcggtgatatttcggtttacgacgattcaaagcacggcacgctgaacgacttcctgaccgctctcgatgaaggcgacctgaagccagatgttgttaagcggttcgaagaactggtggtgcaggcgcagcagagcgcggaagcggcagcggaaagcgaacgacaggcagggcaacatgctgaagcggcagctctgataaaagagcaggttgaaacgctggcagataatgttcagcagaatacaaatgctgtggaggaaaacacgcagcgcgttgaacagctggcctcgcaggttgaggataccgccgaagaagtcaggcaggatgctgaagccgccaaacaggccgcatccgatgcagagcaggccagagatgatattgatgttgcgttatctgcaacgctgaaaacggcgaatcacctgtcagaaattgcagcagagggggaagatgctcagcaggaatcccgagacaatctggggttgaaaagtgctgcaacgatggatgtacaaacagacatttacaaccgaactgaaggttgtgtggcacttccgggagctttcggttatggcgcgtatcccacacaacgtaaggagtttgataaatacgcgacatcagcaacatttgcttcttgggtacagaccactcccccggggcgctatcttgtcgttcaatatggtggcccatattccaaggacattatagaaggggttgtttttagcggagaggtagagataaaaatgctggaaacagcaacgcatgaaaatcaaaacaggcgcgataagtttgtcatttttaacggggttaatcaggacgtgtattgttgtgaggtcagggcggacagtacgaacatacgctggacatgcctgagtcaaaacttaaccgcgatagatggtgcgagatggctgtataacatagctggcccgtggtacgacgtaccattcagagatgtggcagttggcggcttaactcaggccgcgtaccgtgcagcaaatactgatgaatatacgataaaacgtggtgacagcgtaagcggcagcactctgattccctgcgctgttatagtgtcgaatgacggagcaccacggtatgtgctggatactggacgccacttttcgggagcctatgtctctctgggcaacagcactcaggcgaccagcgattttattttcggtctgtttgtgagagtttcctgatgaatgggataaaaataaaagaaatcaaaaacgcccgcaggctggagaatggcgcaattgactgtgaagtgttatttgaggggatgaaagatttcatcccctacacatctacaccagaagacacagcaacaacaggccagcaaatttggcaggagctgcaaagcggtaaatggggggatatagccccgttcactgtatcacctgaaatgctggaagcagcaaaagccgccaaacgccaggaaatcgaagcatggcgcacagaacaggaggcgcagccgttcacgttcgaatggaacggtcgtacctggaatggtggtgcagactcaataagtcgtattgcgcccgtggcaatggcgacaaaggttgcaggtacgcggtcaacgctgggatggggggatgcagcaaataaccttgtcactctgacaatggcacagcttcaggagctggcggcagcaatggcgcaggctcaggtcgatcgcaatgacgagatttatcgccgtcagcgtgaaatgaaagaggatctgaacaatctggaggatttgggttcaatccgagcgtttggtattggctaataaatcaatcgcaactggtgtttagaaccctcccgacttttgaaggttgggagggctggggaaacggttattaattgaggcaatgcataacaggctttaacaaaaagcctcaaaaaacattctccaaaaccagaacgcaactgattgattttggtgaaagacacaacgcggttgccttcaacaataaaaccctttaaaaaccaacttatttcattgaatataaaggattaattatctatatcgctcaccttcttattcagcaaacgagaagcgcgccagtaaaccagcaacatcaggcccattacgatagtcagcgtaatgctggtagctgcaccaaacggccagtcacgaatattaaggaactggaccttgatgacgttaccgatcagcaggtttttcgcaccgcccatcaggtcggatacatagaacaggcccatcgctggcagcatcaccagcagacatccggcaataattcccggcatcgtcagtggaataatgatacggataaaagtctgtaacttgctggcaccgagatcgcgcgccgcctcaagcaacggcttatccagtttttcgatactggagtacagcggcatcaccataaacggcagcagaatgtaaaccagaccgataatcaccgcactgggcgtgaacatgatacggattggtgtgtcgataacgcccagccagagcaaaaactcgttgagatagcctttggtgctgaggaaaattttcagcccgtagatacgaattaatgagttggtccagaacggaacaatcagcagaaacagcagcagcggacgcaccttgtgtggcaacttcgccagaaaccaggcaaacgggtagcccagcaccaggcaggcgagggtggcgatcagcgccatattcagcgagtgcaatagcacttcaaaatagagcggatcgagcagacgcgtgtagttatccagcgtaaagaccattttgacaaaactggcgtcgtcgcgggtcaaaaagctggtgccaatgatcatcaggttgggcagaaagacaaacaacacaagccaaccgacaatagtgacaatcactacattctggaacttacttgtgttcttcatcagccagtacgacctcccagctttctacccaattaatggccattttttggtcgagagagtggtcaaagtcaggatcgtcttcattgaagaattcgctgaccatcaccatcttgccattttccagttcaacaaccgactccagcgtcatgcctttgtagttacgctcgcgaacgtaaccaatcagcccttcagcgtggttgtcgtcgttaatctcttcaacacgtaagtcttccgggcgcagcagaacatgcagtttttgccccggttcaacggcgaagttaacgtagatattacattcgcggccttcaacgttggcgcgtacgcgctgctcgtctagacgttcgatgacagtggcgttaaacatattgatttcgccaatgaagccggcaacaaacaggtttttcggctcttcgtagatttcacgcggcgtgccgtcttgctcaatgcgaccatcgcgcatcaccacaatcctgtctgacatggtgagtgcttcttcctggtcgtgagtcacaaagacgaatgtaatgccaagcttacgctgtaacgctttcagctcgttctgcatttgcttacgcagtttgtaatccagcgctgagagcgactcatccagcaacaacagacgaggcttgttaaccaccgcgcgagcaatggcgacgcgttgctgttgaccaccagagagctgatgcggtttgcgttgagcgaaggtttccaactgcaccatccgcagggcttccatcacgcggggcgtaatttcagcagcgggggttttttgcatgcgcaacccaaaggccacattttcgaacacggtcatgtgggggaaaagtgcgtagctttggaaaacagtgttcacatagcggttttccgccggaacgtgggtgatgtcctcgttatccagcatgatgcgtccggaatcaacagtttccagacctgcaatcaggcgaagaacggttgttttaccgcagccagaagggccaagcagcgtgaggaactcgccattgttgatagtcagatccagctggggaatgacctctttaccatcaaagcatttgcgaattcccgccaattgcaccagcggtgaaagcgaactcggttgtttattcaattttttactctgtcccatgtaaacgcaacggatggcttaccgatgcggggtttgtggttaaccaccttggtgactcttaatgagggcggtaattctacggcaaaccgcttgaatcgccaatctttgttgtgaattactggcttagctttatattcattaaggtaatgctgataaatattcccgcttgcaggggtaaaagtgacctgacgcaatatttgtcttttcttgcttcttaataatgttgtcacaaaaagtgagggtgactacatggataaactacttgagcgatttttgaactacgtgtctctggatacccaatcaaaagcaggggtgagacaggttcccagcacggaaggccaatggaagttattgcatctgctgaaagagcagctcgaagagatggggcttatcaatgtgaccttaagtgagaagggcactttgatggcgacgttaccggctaacgtccctggcgatatcccggcgattggctttatttctcatgtggatacctcaccggattgcagcggcaaaaatgtgaatccgcaaattgttgaaaactatcgcggtggcgatattgcgctgggtatcggcgatgaagttttatcaccggttatgttcccggtgctgcatcagctactgggtcagacgctgattaccaccgatggtaaaaccttgttaggtgccgatgacaaagcaggtattgcagaaatcatgaccgcgctggcggtattgcaacagaaaaaaattccgcatggtgatattcgcgtcgcctttaccccggatgaagaagtgggcaaaggggcgaaacattttgatgttgacgccttcgatgcccgctgggcttacactgttgatggtggtggcgtaggcgaactggagtttgaaaacttcaacgccgcgtcggtcaatatcaaaattgtcggtaacaatgttcatccgggcacggcgaaaggagtgatggtaaatgcgctgtcgctggcggcacgtattcatgcggaagttccggcggatgaaagcccggaaatgacagaaggctatgaaggtttctatcatctggcgagcatgaaaggcaccgttgaacgggccgatatgcactacatcatccgtgatttcgaccgtaaacagtttgaagcgcgtaaacgtaaaatgatggagatcgccaaaaaagtgggcaaagggttacatcctgattgctacattgaactggtgattgaagacagttactacaatatgcgcgagaaagtggttgagcatccgcatattctcgatatcgcccagcaggcgatgcgcgattgcgatattgaaccggaactgaaaccgatccgcggtggtaccgacggcgcgcagttgtcgtttatgggattaccgtgcccgaacctgttcactggcggttacaactatcatggtaagcatgagtttgtgactctggaaggtatggaaaaagcggtgcaggtgatcgtccgtattgccgagttaacggcgcaacggaagtaagcgaaaagggatgcggcatgtgatgccgcatccggcttaaatccaaacttacccttcgaagaaccaatacccgctattgaccagcgccgagagcatcgcgaggaatgacggatcttccagcgcatcgccaaaattctccgcagtcagcgcaatgttgctggcgagtgcatccagtgccggacggtgcggggaatcgatcttctcaccattggcatacacgtcgtcgccaatgcgcaatacgcgcagaccacccaggcgcaccagcacttcaccttgtttcagcgcatcgtagatttcatccggctgataaggcggctctggcggcgcgatatccagttcatgacgtgactgggatataaactcgccaaaccattgcttaaagtgttccggctggttgatcaattcgagcatcatctcacgcagtttatccatctcttgcggcagaacatccgcaggatgagcgcgaggtggaacatccggatcgctgtagtagttgccgcccagttcacgttgcagcacataatcggcaaatccactaatcagttcccgcgtatttggcgcgcgaaagcccacggaatagttcatcgcattttccagcgcgtagccttcatgcgggaatcctggcggaatataaagaatatcaccaggctccagctcttcatcgatgatggcttcgaacggatcgacctgtaacagatccggatgtgggcagtgctgtttcatttgcagcttttcgcccactcgccagcgacgacgtccggtaccctgaatgataaacacgtcgtactgatcgagatgcggaccgacgccgccgccgggtacagaaaaagaaatcatcagatcatcaatacgccagtccggtagttcacggaacggtcgcatcagcgcggcggtcggctcatgccagtggttcactgcctgtaccagtaatgaccagttggtttcaccgagatgatcgtagctttcgaacgggccgtggctgacctgccatttgccatcctggtgactgaccagtcgactgtcaacttcgctttccatcgccagacccgccaactcgtctggagagatcgggtcaataaaattattaaagccgcgttttaacaccaccgggcgtttctgccagtgacgttcaagaaaatcgggccagttaagagtgagttggtattccatgttaagcatccacaggctggtatctgcaaccgattataacggatgcttaacgtaatgcgtgaagtatgggcatatttattcatctttcggcgcagaatgctggcgaccaaaaatcacctccatccgcgcaccgcccagcatgctctctccggcgacgattttaccctcatattgctcggtgatttcgcgggctaccgccagccctacaccttgcccagggcgtaaagtatcaacccgttgaccacggtcgaaaatgacctctcgcttgcttaatggaataccggggccatcatcctcgaccacaatatagagatgctcgtcggtttgccttgcagaaatttcgacaaactcgaggcaatatttacaggcattatccagcacgttgcccatcacctcgacaaaatcgttctgctcaccgacaaagctgatctctggcgaaatatcgagagagatattgacccctttgcgttgatacactttgttcagcgctgaggtgagattgtccagcagtggggcgaccggatgcagctcgcggctgagcaatgtcccgccgcgcatactggcacgatgcaggtagtagccaatttgctgtgaaatgcggctgatttgctccagcattaccggctcagcatcactgacgctcatcttttcactacgcagagaacgcagcgtactttgcagcaccgccagtggcgttttcagactatgggtcaggtcggtgagcgtcgtacggtatttgtcgtaacgttcgcgttcactttttaacaatcggttcaggtttcgtaccagactggtcagttctcgcgttgtggctggattgagcaattcgcggttatgttcttccagttcgcggacttcttttgccagggcttcgatggggcgtaaactccaccaggcggcgacccacagcagcgggatcactaacagcagattggctgagagcacatagataaaccagctccagaccatataggaactttttagctccaccggaatggtatccaccaccacaatggttaattttggcatccgcgatgttgccgggtagacgtttactgccaccgagtgggtcatctccgcgtcgtcatcatcttcccgcacttcctgcaactgttgctgtatcgaatgatctccactcagcaagaggctggtatcgttaacatccgcttcaatttcatgaaaaccattcgatttcagccagtcaggctggatcatcttcatcagccagggcacgtcacgttgcgcccataaaagctgcccgttctcatcataaattagcgtcatggtggggctttgcttgtcgatattttcgggtaactcgacatgcaacttattgttttcccacttcgcaagggtatagaacagattgctctcgccacgtaacagccgaaacgtagttttatcgaaactgacgctataaccgatcagcgcgaccattccgtaggcaagcgaaagcaccagtactaccgctgccgttgccaacagaaaacgtacccgcagcgagagcgggaaaaaaagacgcagtaattttttcatcagcgcaattcgaacagatagccctggccgcgaacggtggtaatcacttcttggggatattgtgcctgaatttttttgcgcagacgtcccatcagtacatcaatggtatggctttcccgcagctccgcatccggatagagttggagcattaacgaatctttgctgaccactttgccattattgcgtatcaacgtttccataatggtgtattcgaacgcggtcagtttgatcacttcgtcattaatagataattcacggcgagagagatcaacctgaaacggggggagcgaaatgacctgtgaagccagaccgctattacgccgcattaatgcctgcattcgcgccatcacctcttcaatatgaaacggtttagtcacataatcatcagcaccggcacttaatacttcgactttgtcctgccagctttcacgggcggttaataccagaatcggcagtgaaacatcgttgctacgccagcggcgaatcagtgacagaccgtcctcgtctggcaatccgagatcgacaatcgcaatatccggtatatgttcattgagataataatcggcttctttggcatcttctgcgtcatcgacctgatgaccagcatcctgaatctgaactttaaggtggtgacgtaacaacgcattgtcttcaacaaccagtacgcgcatttttatttctccctgtcttaattattaaaatagtgtaacgcgattatgtggttatgggggtaaacattaaataaaccagcggggaggggaggtaaagtgaaaaaataaaaagcggataatcttaataagcaggccggacagcatcgccatccggcactgatacgaggtttatttcagctcatcaaccatcgtgatagctcgaccaatatagttagccggcgtcatcgctttcaggcgggctttctcttcttctggcaacgccagaccatcgataaactgcttcatgccttcggcgtcaacgcgcttaccgcgagtcagctctttcagcttctcgtacggtttttcgatgccatagcgacgcataactgtctggattggttcagccagcacttcccagttgtgatccagttcatccagcagatggtcacggttcacttccagtttgctcacgcctttcagggtggattgatatgcaatcaaggcataaccgatacccacgccgaggttacgcagcacggtagagtcggtcaggtcacgctgccagcgggaaaccggcagtttgcttgccagatgctgcaataccgcgttggaaaggcccagattcccttcggagttttcgaagtcgatcgggttaactttatgcggcatggtggaagaaccaatctcaccagcaatggttttctgtttgaagtggttaagggcgatataaccccagacgtcacggtcaaagtcgatcagaatagtgttgaagcgcgcaacgcaatcaaacagttcggcaatgtagtcgtgcggttcgatctgggtggtgtacgggttccactgaatacccagcgaggtgacgaactcttcgctgaactgatgccagtcaacttccgggtaagcggcgatgtgggcgttatagttaccgaccgcgccgttgattttgccgaggatctccacctggttaagctggcggtactggcgctccatacggtaggcgacgtttgccatctctttaccgatggttgacggcgtggctggctgaccgtgggtacgagacagcagcgggatatcgcgatactgaacggcgagatctttaatgccatcaatcagttgacgccagtatggcaggatcacttcatcacgcgcggttttcagcattaatgcgtgggagaggttattgatatcttccgaagtacaggcaaagtggatgaattcagaaaccgcgtgcagttccgggatctccgccactttttctttcaggaaatactcaaccgctttaacgtcgtggttagtggtacgctcgatagttttgatgcgcgccgcatcttcttcgctgaaactggcgacgattgcatcaaggtaaccgattgcgtcggcagcaaaagcaggaacttccttgatcgctgcgtgcgcggccagtttttgcagccaacgtacttcaacttgtacacggaatttcagcaaaccatattcgctgaaaatcccgcgcagcgcgctgactttatcgccgtagcgtccatcgacaggggaaacggcggtcagtgaggataattccatagatcacaactccggggttaaatgagcaagaatttgttttgcctgagtggtcaggcgattacgagaaaacatcagttgcagacgtccgccgccgacctggtgccagagcacggcggcgcgaatgcctgccagcagggttgcgcgaactttcgcctgcacttgtgggctttgcagtacagcaggggaaccggtgacctgaatgcgcgggccaagcgggctaatcacatcaacatagatagcagccatcgcgctcatcagcgtttcggactgtaaatcgaagtgttcgagctggcgttgcaggccgttgatccggttgcccagagtgtcgagcgcgcctttcgctgaggagagtttgcgctcaagcaccatcaagctgagtgtgtagcgggttaattcggcgtttaagccctggcgactgctggcattgagcacgccgagcagggtttccagcccgacgcgcaggttggcttcgctaccgccaaaaaccgccagcgtcgagctggggttcatatcaataatactgttgagtgagacgtgtagcgcatcggcatcacaatgcccctggtgagcgagttgttgcaccaggcgtgccgactgacaaataccggccagggcgagggtgatgtcatagtaattctttgccacgttcactgcttccttgttttaagtaaagataataatcagaccggcagcggcagacgctgctcaataataccgccaccgaggcacacttcaccgttatagaagacggcagactggcccggcgtcacggcggcaaccggttcatcgaaaatcacttcaatgcgatcatcgtccagcgccttgacggtgcaagggatatcggtctggcgatagcgggtttttaccgtgcaacgcatagtgccggtgaatggttcgcgatcgacccagtgcaactgctgggcaatcaacccgacagacatcagccgcgggtgttcatggccctgagcgacaaccagaatgttgttttcgacgtctttgtccaccacataccacggttcttcggtaccttctttggtgccaccgatacccagacctttacgctgaccgagagtgtgatacatcagcccctggtgctcaccaatttcatcgccatcgacggtaatgattttgcccggttgcgccgggagataacggcccaggaactcgcggaatttacgttcgccaatgaagcaaatgccggtagagtcttttttcttcgcggtgaccagaccaagatcttcagcaatcttacgcacctgcggtttttccagttcgccgaccgggaacaggctttgcgcaatctgctcatggctgagcgtataaaggaagtagctctggtctttattgctgtccagaccacgcagcaggcggctcttgccatcgacatcggcccgacgtacgtaatgaccggtagcgatataatcggcacctaaatcttcggcggcaaattcgaggaaggctttaaatttgatctctttgttgcacagaatatccggattcggcgtgcgaccggctttatattcggcaaggaacagttcgaagacgttgtcccagtactcggcagcaaagttaacggtgtgcagttcaatgccgagcttgtcgcagacagcctgggcatcagccagatccgctgccgctgtgcaatattcctcaccgtcgtcttcttcccagttcttcataaacaggccttcgacctgatatccctgttgttgcaacagccaggcagaaacggaggaatcgacaccgccggacatgccgacgattactttttttgcggtttcagacattggatcactcacgacattgaacttcaaggcggcgtattctatcacgcagccttttagatgacaccctttgtaaaaggccagttaaaatcgccaatcatctccagcggataacgttgcccgctttgataacaacgaatactttccgccaccagcggcgaacgaagatttgacgcctgtaaaatttcttcggcgctgacccaacggcagcagtcgatatcgctgtcatgaggctgggtcgggcatatttgctcaagctcaatggcaaagaggaaacgcaaaaacggcgttttatctggcgcaatccactgatgcatacgaataaagtgttgcggctgcgcgctgatgccggtttcttcccacagttcacgggcggcggcttccactaaggtttcatcggcttccagatgcccggcaggttggttccataacgctttaccattaatcgtctcttcaacgactaaaaatttgccttctgcgtgcaccacgcaagcaacggtaacgtgcggtttaaacattttgcatccttaatctgtcacttctcgccattcaccattggcaagattatccaaagagtaatcacccatcgcatagcgaatcagtcgcagcgtggggaagccaacatgggcggtcatgcggcgcacctggcgattacgtccttcatataaggtgatcttcagccagctggtgggaatacttttgcgttcacgaattggtggattccgcggccataaccacgcgggttcgtcaaccagctccgcgccggcgggcagggtagggccatcatttaaggttacgccattgcgcaaggcttcaagtgcgtcttgtgtgggaataccttccacctgcacataatagatttttccggtgcgtttacccggctgggttaaacgcgcctgcaacgcgccgttattggtcagcaccagcaacccttcgctatcgcggtcaaggcgacctgctgcataaacaccctgaaccgggatgaattcttttaatgttttgcgtccggcttcatcggtgaactgcggaagaacatcgtagggtttattgaacaggatcacacgcgtgggctggttttcaggtttacgcctggtagaacgttgcgagctgaatcgcttaacctggtgatttctaaaagaagttttttgcatggtattttcagagattatgaattgccgcattatagcctaataacgcgcatctttcatgacggcaaacaatagggtagtattgacaagccaattacaaatcattaacaaaaaattgctctaaagcatccgtatcgcaggacgcaaacgcatatgcaacgtggtggcagacgagcaaaccagtagcgctcgaaggagaggtgaatggaaagtaaagtagttgttccggcacaaggcaagaagatcaccctgcaaaacggcaaactcaacgttcctgaaaatccgattatcccttacattgaaggtgatggaatcggtgtagatgtaaccccagccatgctgaaagtggtcgacgctgcagtcgagaaagcctataaaggcgagcgtaaaatctcctggatggaaatttacaccggtgaaaaatccacacaggtttatggtcaggacgtctggctgcctgctgaaactcttgatctgattcgtgaatatcgcgttgccattaaaggtccgctgaccactccggttggtggcggtattcgctctctgaacgttgccctgcgccaggaactggatctctacatctgcctgcgtccggtacgttactatcagggcactccaagcccggttaaacaccctgaactgaccgatatggttatcttccgtgaaaactcggaagacatttatgcgggtatcgaatggaaagcagactctgccgacgccgagaaagtgattaaattcctgcgtgaagagatgggggtgaagaaaattcgcttcccggaacattgtggtatcggtattaagccgtgttcggaagaaggcaccaaacgtctggttcgtgcagcgatcgaatacgcaattgctaacgatcgtgactctgtgactctggtgcacaaaggcaacatcatgaagttcaccgaaggagcgtttaaagactggggctaccagctggcgcgtgaagagtttggcggtgaactgatcgacggtggcccgtggctgaaagttaaaaacccgaacactggcaaagagatcgtcattaaagacgtgattgctgatgcattcctgcaacagatcctgctgcgtccggctgaatatgatgttatcgcctgtatgaacctgaacggtgactacatttctgacgccctggcagcgcaggttggcggtatcggtatcgcccctggtgcaaacatcggtgacgaatgcgccctgtttgaagccacccacggtactgcgccgaaatatgccggtcaggacaaagtaaatcctggctctattattctctccgctgagatgatgctgcgccatatgggttggactgaagcggctgacctgattgttaaaggtatggaaggcgcaatcaatgccaagaccgtaacttatgacttcgaacgtctgatggaaggcgctaagttgctgaaatgttcagagtttggtgaagcgatcatcgaaaacatgtaatctctccatgtgttaaatattgaaacgggcgtataacacgcccgttgttttatttatgtggatattattaatagcatatcgagcatatttatatgaagcccattacttgagcccatatgggcatatttttataatgcaactattatgtaaacatttatttgttattttgctttctcctggaggacactcttgactgcttttgagtaaactccataaatccttgttgaatggtgcgatgtgataaatagtaataggatattctttatccttaaggataataccagacttaaccggtgtaaatatactgccaggagggagaaatatagtagattgataccagatgatcattttcatattaccccatatggctgaaaaagatataccacatgtaggttgaattaccgtgtcaattactatccacttcatttgttatgtcttatcccacggtatttaatatggttcattaggatgtttatttcttgattttgcatatgagtatattacccccccccccctcaaaaaaataaattaattaaaatgatggcttatataaaataaaatttaaagcaaggaatctcaatggatgttaaacaaaatgagattttgtgaaagcaataaattattgacttcgttttagatttgtttagctataatgttatacattcaaatgactgaacatcctgtaattaaaacatagcctttatgctactttgtgccaatttgctaaacattatggttgcctttttatataacgataataatgaatataagcatgacatgagaataaggtttcaatttttgagttatataggaatgatttaacctgttcctggctaaaatacatataaccggatgatgactaaaccaaaatacatgtgcgttaagtattgaaacggacgtgtggcacggccgttgtttttataaatatgttaaccgttataaaataacgtatcaaaagtcaagtgatcacatttcaaatatcaagttgatagtattagtctggtgattatttatgggtgacaataaaaagacagtattaatcatccatagagatagtctctgcacttttatttccattatgctaatgccttactgaattatgaagcatttcttaagtatccaactttagctagattaatggtttattattttctacatcttcaatatataaaagcgtattatcaatggcgtagtaactgcgtttgttatgattaacatcagtaacccaccggaaaacgcccgcgcctgccagtgttgaacagtattcccgaaatgtagattttccgcaaatatgaagcaatgcggcctcttttattttagcagggttcttggtcgtactaacttttaacaggttcctggttcctcttaataacaaaaccgtatcatcgtgagtaataattctgatgttatccgtagccagataataaatgtaatgtgcaatacggtgatgttttaattctgaataaaaccaggagaagttttgctcttttctcacttgctcaaacatcttttgaaaaacaacgacctgatccatcaggataataacctcttgttagttgtgagactgcgtagtgtgcacgatcggttttaccacttcaatctggtctgtcctttggctgtgatatgtacagagtgtgatagagggaatatctgaattctcccggtgagcattttgcaacggaccagctccggtacaaacgctgttgtgggttcagattataacattctgtctaaggggcgggataaaggtgaaattagggggcatgaaagatgactttataaccttgctcaccccagtgttgtaaaagttcgttttgccttctcgttggtgccatgcctgtccagacaatcaatgtttgcgtcgggaacagttccgggcgcggcgattcaatgggatcagcaagaacagaaatgtgccatcctgacaatgataaacgccatgcttccagccacaatcgtgctctctcttcaacattccacgccatcagaatggcttctttaccgggcttacggcgcatttcgaaaagcgaggttgctgcgtattcaattaatgcgccgtcaaacatactgctcataatgcgggaggtgttgtgatcaagcacgagacgctggcgaacaggaaggtaaacatgattaatcaattgatctactgggtactctcgacccagtgaaataattctcgcgcgtagtttggcaggattagccatgcgaagaattgacatcatctcttcttgcaggcggctccagtcatcttccgtatcctggctggtggtttccagtaatgctttaactttgcctacagggacgccattacttatccaacgcttgatctcttcgatgcgttgtatgtcttcttcatcaaagagtcggtgtccgccttcactgcgctgtggttttaacaaaccgtagcggcgttgccaggcccggagagtgacaggattaatcccgcaacgttcagcaacatcaccaatgctgtaataagccacaattcctccttgcggtcacaaatctccgtcgcctgtacacgacccaataatactttgtacaatatacgctaaaattgtacaaagtataaataagatttcagctaaattggatgaaacattatttttaatgtggattaaatttaaacgtaacgtattcattttcacgatgatttactgaaatcatgtgaaagaatgtgctgaaaattattttttctctggccacgctatggaagggataccattcaatttagctttagcaaacagatctccctgaaacatctcaattcctgcggattcaagccacatccactcttctggtgttgccacgcccatagcactgacttgaatttcaagtgatgtacagcattttatgatcgcctgaataattgcctgccgtggcccacttttatgaacattggtaatcaattcctgactgattttaattctgtcaggctggaagcgtgacaggagtaacaaaccagcaaaacctgcgccaaaatgatcaattgctacactgataccagcagcctttagcgatttaatcgcttcggcaaactcatcaaaccgagatatgacttcactttcagtaaattcaacgatgatttgttcaggcaccagagcattggcctttatttcattaagtaaaaaagagactgcgtcaggttcgttaaccagggtcataggtaatagattgattgaaatcattttatcaccgagctcaagtgcgtgtgccatcgtgaatgcaagcgccttacttttgagatccgctgtgtagatttccccgtctttacgctgcccaaccgctatggctgatgggctatcttcatttttttgcacaatggcttcaaaagcgattatccgccgcgataagggatcgacaataggatgaaaggcaaagtggtcgtttatagttggtgaaagggcacaggaatcaagttctttatcagatccgtcagcgataaaaagccaggagtcttcggcagggatctcgaaataggttgattgttcggttgcaaggacaaaagtacgaaaaaattgtagcgctctgtcatcataagttagctgaaattttgatgtgcctttgtcgaatacggcctgtaaaacgtcatctcgctcgtgcaggcgcaaatcaaataattccattcccgctttgccaaaacggcgagcaggcgcgtaatcgcacagcagctcaacaatattatagtgccgtggatcctggcatatagcccgatatatcattttaacctgttcttccggaccttccagaagctggaaaaaatgagaaccattaaacagtaagatccctgttacgtcagactgcatgttcctgcgatttgctatcgaaaccatttcttcgatttttttgacaggttcgtcgtcacgtatatggctacgataaataagggtggtaagcattaacaatccagggtaatgggtgaggcgagagtaagacggtaacagacatatcttcttgtgtctttcttttaataccaaaacataaccgtttctttacattgataaaaaatggaaaaagttgaacactagttggcgaaaaatcttgtatagattgtcagttaaatgatgcaatatgttttatcataacacattgttttatatgcattagcactaattgcaaaaaattaatttatcattctgtacacatatttcgtacaattttgctattgttacttcacttaacattgattaacatttttaacagaggcgtagcatgcatcaaaattcagtgactttagattctgcgggagcaatcactcgttactttgcaaaagctaacttgcatactcagcaggaaactctcggggaaattgtgactgagattttgaaagatggacgtaatctgagtcgaaagtcgctttgtgccaaacttctttgccgactggaacacgcgactggggaagaggaacagaaacattataatgcactaattgggttgctttttgaataatgcaacagcctgattatttaacaggttagctatgaagtcgttatgaagacatctgataatgaacgtataaaatatgaaattactggccaggcggtgctccagatactgcgcatgaagataaatttttcattgcagactcttattaagcaattactcgtaatgaaatcggctgaggaagatgctttccgacgcgatttaattgacagcataattcgtgattttagcaatagtgattcaggagggccaaaccgaagaacagcgacagctgacaataaaagtatgttcaatggtaagaacataaacagaatacattaaaatttcataagtaagatgagaggttaccatgcttgaagatactacaattcataatgcaataactgataaagcgttagcaagttactttcgcagttcgggtaatttgttagaagaagaatcagcagtgttagtgcaggctgtcaccaatttaatgctttcaggcgataatgttaataataaaaatattatcttaagtctgatacactccttggaaacaacaagtgatattctcaaagctgatgtgattagaaaaacactggaaatcgtgttgcgatacacagctgatgatatgtaacttctaattattaagtataagtttatagaaaactcattcatcttatttttgtctgtcgctttagactatacacagcataattttattgggttaatatttctacgaggctgacatgaataattcaatcccagagagatttatttttcaatgtgctttgtttaaaaatctcgagagggaggtgttcatgacgcatgggtatgttgatagtcatattattgatcaggctttacgcttgcgtttaaaagatgaaaccagtgtgattctttctgatctctatctgcaaatattgcagtacattgaaatgcataagactacactaacggatatcattattaatgacagggaatccgtgctctcttagaacttgagtaaggttttagaataaacatcagctgtatcaccatgctgatgcaaagtgagcatttcaggcgttatgctttcttattatgtccgcaatatcaggtgtcaagaatggagagttctcgctctccattcttgacgcctgatatcccgcctaacttattttgtactgcctacattatgctcaataattaatgggttagatcaagatggagaaaattttatcttcggcgtggatatttcttatgctctctaccatgctctctgtagatgccagcgcgagcgaatgaatggcattttcatgtattaaaccctttggccgggacaagcaaatgcgcaatacactcatacccatcctcgttgcgatatgcttgtttattaccggtgtcgctattttgaacatccagctctggtattccgcaaaagcagagtacctggcgggagcgagatatgccgccaacaatatcaatcatatacttgaagaagcgtcacaagcgactcaaacagcggttaacattgccgggaaggaatgcaacctcgaggagcaatatcagcttggcactgaagcagctctgaaacctcacctgcgcacaatcatcattctcaaacagggaatagtctggtgtacatccctgcctgggaatcgggtcctgttgtctcgtattcctgttttcccggacagtaatttactgttggctccagcaatcgacaccgttaatagattacctatcctgctctatcagaaccaatttgcagatacgcgcattttggttacgataagcgatcagcatattcgtggggcacttaatgtacccttgaaaggggtaaggtatgtattacgcgtggcggatgacattattggaccaacgggtgatgtgatgacgcttaatggacattatccctataccgagaaggttcactccacaaaatatcatttcactattatctttaacccgccgccactctttagcttctacagacttatcgataaaggctttgggattttaatatttattctgttaatcgcctgcgccgctgccttcctgcttgatagatatttcaataaaagcgcaacgcctgaagagatcctgcgacgggcaataaataatggggagatcgtccctttttaccaacctgtggtaaatggtcgggaagggacattgcggggagttgaggtgttagcccgctggaaacaacctcacggtggatatatatcacccgcggcatttattccacttgctgaaaaatccggattaatcgttccgcttacgcaaagcctgatgaatcaggttgccagacagatgaacgctatcgcgagtaaattgccggaaggttttcatattggaattaattttagcgcttcgcatattatttcgccgacgtttgtcgacgagtgtttaaatttccgtgacagttttacccgccgcgatttaaaccttgttctggaagtcaccgagcgtgagccattgaatgttgatgaaagtctggttcagcggttgaacatactgcatgaaaatggttttgtcatcgcactggatgatttcggtactggctactcagggctttcttatcttcatgacctgcatattgattatatcaaaattgatcacagtttcgttggccgcgtaaacgcagacccagaatcaacccgaattctggattgtgtattggatctggcgcgtaaactttcgatcagtatcgtcgctgaaggtgtcgaaacgaaagaacaacttgactatctgaaccaaaataatatcacatttcagcagggttattatttctataaacctgttacatacatcgacctggtcaaaattatcctttctaaaccgaaggtgaaggttgtggttgagtgaaaattgatcagtaaggccatagtgcggtgtaattatagacagctaattagctcgttgcctcttgttactattgttcattattttgtttgctataattgtttgaaagttttgacaggattgccattagtagcatgaacaatagtaataatctggattatttcactctctatatcatattttccattgcatttatgctgatcaccctcctggtcatccttattgcaaaacccagtaccgggctgggagaagtgcttgtgacgataaatttgcttaatgcccttgtttggctggcgatcaatctggttaatcgattaagagaaagactcgtcaaccacagggatcagcaataatctttcagtttctcactgtcagtatgcggctgaatgggttgctggcagtgaacgcctggatcattgaaggaaaggcattattgcgcaaatagttgtcaaccctggtgttatcacggttgtttttatatatcaccgaaataatcctcatcgcaactattaacaattttgatgtcgaagagttatttgttaaacaaaatcgtcacctcaaagtgatcaatgtcatgaaaataaggtgaaaaatgataatgccgacttatttatcatttatatattgtcgctgtttatctatttaaattttttgtgcttttgtttttgtctttaccctccgttttggtaatctgagctcataggttatttgaccaggaatgtttgttaatccaatgaatggatggttaatctatgaaactgaaaaaactccccgggtttagtttgggacttattgctctggcggtgggtaatgcatatgcaacacaattgttggatgattatagtataatttcctatatgactgatgaagaatcgccgattgaaatcaaagataataatccgataagtaatggagagtatctaaccactgaagacgaaagccatgctgtgaaagtggatgacggtgtaactggatatataaataatgccagtgtgatgactagtggtgatggatcttatggtatttctgttgatagtcaaaacaaagtattatatataagcgatagcgatattaagacctctggaagcgtatctgacaaagaaaatggagggataacagccagcgcagtagtcagtgaatttggtggcaccatctttatgaatggtgataattcagtcgagtcgggtggggcatattcagcgggacttttaagccaggttaatgattctgaaaagatggtaaataacacccgtcttgaaaccacagataaaacgaacattgttacctctggggaaaatgcagtaggtgttcttgcatgttcaagtcctggagagtctcgaacatgtgtcgatgctgtagatgatgaagttagtgattctaacagttacgaagttattagccgtgctgatttaaaaatgaatggtggttccataacaactaatggcattaatagctatggtgcttatgctaatgggaaaaaagcatatattaatttagattatgtggcacttgaaactgtggctgatggaagttatgcagttgctattcgacaaggtaacattgatataaaaaatagttctattacaacaacaggcactaaagcccccattgcaaaaatatacaatggtggagagttatttttttccaatgtcaccgcggtatcaaaacaagataaaggaatatcaattgatgcatcaaatatcgattctcaagccaaaatagcactattaagtgttgaactttcaagtgctttggatagtattgatgttaacaaaactacaacggatgtaagtatccttaatcgaagtattatcacacctggtaataatattctggttaataatactggaggtgacttaaacataatttcgtccgactctattctaaatggagcgactaaactcgtcagcggcacaaccacgctgaagctttcagaaaatacaatctggaatatgaaagatgactccgttgttacccatctgactaattcagacagtattatcaatctttcgtatgatgatggtcaaacatttacccaaggaaaaacattaaccgtaaaaggtaattatgtcggtaataatggtcagcttaatatccgcaccgtattaggtgatgataaatcggctacggacagacttattgttgagggtaatacttcgggttcaactaccgtctatgtgaaaaatgctggaggaagcggcgcggccacgctaaacgggatcgaactcataactgtgaatggcgatgaatctccagcagatgccttcagataaggtgatgcaaggattgcagctggagctttcgaatatcaactaaaacaacaaggcaaaaactggtatttgacaagttatcagtcagtgaatgaggaggataacagctcagagggaaattcagaatcaacagaaacgcctacccccgtcctgcgccccgaagctggaagttacgtcgctaacctggcagctgctaacactctttttgttatgcgtctgaacgaccgtgcgggtgaaacgcgctacatcgatcctgtaactgaacaggagcgttcaagccgactttggctacgtcaaattggcgggcataatgcctggcgtgacagcaacggacagttgagaacgacctcgcatcgctacgtctcgcagttagggggcgatctgttaaccggtggttttaccgatagtgacagttggcgtttgggagtgatggctggttatgcccgcgactacaacttaactcattccagcgtgtcggattatcgttcgaaagggagtgtcagaggctatagcgcagggctgtatgccacctggtttgccgatgacatcagtaaaaaaggcgcatacattgactcctgggcgcaatatagctggtttaaaaactcggtgaaaggggatgaattagcctatgaatcctatagcgcgaaaggtgcaaccgtctcgctggaagcgggttacggttttgccctgaataaatcctttggtctggaagcggcgaaatatacgtggatcttccagccacaggcacaggctatctggatgggcgtcgatcataatgcgcacacggaagccaatggctcacgtattgagaatgacgcaaataacaacatccagacccgactcggcttccgcacctttattcgtactcaggagaaaaacagcggtccgcacggtgacgactttgaaccttttgttgaaatgaactggatccataacagtaaagattttgctgtctcaatgaacggtgtgaaagtcgaacaagatggggcgagtaatttgggggaaattaaacttggcgtaaatggcaacctgaatccagcggccagcgtctggggaatgtgggcgtgcagctgggtgataatggctacaatgacaccgcagtgatggtgggcctgaaatataagttctgatcccgccgttagctaaaaaaccgcgtcgtattcatcgacgcggtacatatgaaatattattttttgccgatagcacgcatggtgtcatcaattgccgtgatcaacagcatttgcgggtctttagcgcaaacctgattcagtttttctaccactttggcgctcagttccggagattgctcaatttttaaatcacggctggcaacgctggcattacccattaccgcaacaatttctgcaacctgtgcgctgtcagtttttgccatttcgttggcttctgcgcaagtaatataggtttctgacggcaaaccgtttttaatattgtagtcctgcgcccaggtcattggtgcgaaaacaaacaggcccgccagtaaagcaaattttttcatcatcattccttatttcattttacccagaattgcaccacccgtaccgccaatcacggcacctttaatcgccccttcgaggccattgccggtcagaacgccagtgacagcaccaacggcggcacccacttttgcacctttacgcgcatttttaccgtcgcggcctttttctgttactgcaccaacaccagcgccaacagctgcacctttcagtacgccattaacaccattgccagtaagtaaaccaacgcctgcgcctagcaatgcacctttcgtggtgcggttcatatccgccatcgctggcgtggagcagaacaatgctgagataagcccgaaggcaagtatttttttcttcaacttagatgtccggtattaagtaagttgcacacacaataatttcgtcttcaattaagatctgcttaactaaagaacgctcgctattattcagataattcaaaatgagcgtggctgtgatgataggaattatgttttttacgtgaatgagaataatcttaaatgaggaataactcattgattgacaatatttttattcaagaagtgtcattgactgttaacgcaatgttgtaaaggtaagataatctgatttatcaatattattgtgtgatttttatgtgagcagaagatattcatcagcaacgattacattagtcattttattttgccgacggcctcattgtcgaaagataagcgtacgacagtattatcagaaaagagtgattttttatccaactacacttcagcgcactgcgtgtaaaaaatgcctctttcttatgcgggatatcatcatttcatcatgatgtctttggtgagcggtgaacacaatacacctgcgctgtctcttcaggatgaatcccctggtctggtgcctgcgggctgatgttgcagcagagcttaggtcacttagacgctactatcatttatccaatggcatggaatcgaaatcagtcgatacccgcagtatatatcgtgaactgggtgcaacgctgagttacaacatgcgcctggggaacggtatggaaatgaaccctggctgaaggcggctgtgcgcaaagaatttgtcgatgataaccgggtgaaggtgaataatgacggtaatttcgtcaatgatttgtcgggcagacgtggaatataccaggcagctattaaagcctcattcagcagtacgtttagcggacatctcggggtggggtatagccatggtgccggtgtggaatccccgtggaacgcggtggctggtgtgaactggtcgttctgaccatcaacgattaaactgcgcttcggcgcagttttcgtttacaggatgttgaaagggaaaattctggggcaaaaaaagcccgccagttacggcgggaaacctcatcctatgggagaacaatgaataatgaaattgcggggttatcatctcccagtatatccatactaacaataaggttatttactcaaccaggcataaacattttgttttgtgcgtgggaacagccttaaggtgtaaagggggaggtggaaatagcaatgaggagtatcagcaagaatactcgccgctttaccacaacgtggatgagagggatgaaaaactcaaggcagagataactctgccttgaagataaatgcgcttttacagcgggcttatttcagctcttctgcttccggtaaggtcacgttcagctcaagaatagaaatatcgccatctttttgctcaagctgtacggttaccatctcaggatcaatttgtacgtatttacaaatgacctcaagaatatctttacgcaactgcggcagataatgcggttctgcatcgctgcgacggcgttcagcaacaataatctgcagccgttcttttgcaatgttggctgtgtttttcttccgcgagagaaagaaatcgagtaatgccataacttatcctccgaacaagcgtttgaggaagcctttcttctcttcttcaatgaagcggaaaggacgttcttctcccaacagacgttctacggtatctgcgtaggctttacccgcatcggcgttaatgtcgagaatgaccggttcaccctggttagaggcgcgcaatactgattgatcctctgggatcacgccgacgagtttgatgcgcaggatctccagcacatcttccatgctcagcatgtcacctctgcttacgcggcctgggttatagcgcgttaacagcaggtgctctttaataggctcttcgccattttctgcgcggcgtgatttcgacgccagaatgcctaaaatacggtcagagtcgcgtactgaggagacttccgggttggtggtaataatggcttcgtctgcaaaatagagtgccattaacgcaccggtttcaatccctgccggggagtcacaaacgataaattcaaaatccatcgctttcagatcatcaagaactttggcgaccccttcacgggtgagggcatctttatcgcgtgtttgcgatgccggcagaatatagagattttcagtacgcttatctttaattaacgcctgatttagcgttgcatcgccctgaatgacgttgacgaaatcgtaaacgacccggcgttcacaacccataatcaggtcgagattacgcaggccgatatcaaaatctatcacgacagttttctttcccttctgggccaaaccagtggcgatggccgcgctggaggttgtcttaccaacaccccctttgcccgaagtaacaacaataatgcgtgccatagaaattccttgttaaaaagggatcaatttaacggttgaacggtcaaagcgttttcgactaactgcagtcgcgccgctttgccataaaattctgctgggatttgatcactcagccagtattcacctgcgatggacaccagttccgccatcaggttcgtacaaaatatttgcgtttcccggtcaccacttgcccctgccagcgcacgaccgcgcatcatgccatagacatgaatgttcccatcggcaatcaattcggccccagcgctaacgtggcttgtaacaatcagatcacattgtggagcataaatacgctgaccggaacgcaccggggtatctattaaacgcgtttttgtgaccggcgttgtattttgcgctggagcctgcggtgtgggagctggacgtggcgctttttcctttccttccgtcaggataggcagccccatcttttcaatttcggctttaagttgcgcatctttgcagccacttacgccaataacccgcaaaccggttgccgaaaccgccttatgcatcgctgaccagtttaccgggtcttccagtgcactgacgttgagtacaacgggggcatgttttaaaaatgcgggggcctgagcgattttgtcttccagcgcctgatggataaccttaggttctgcctcatgcagatgaaccacagataaagtgaagctactgcctttaagctcgattggcgtgtttgacatcctggccttactcaattagctattaatcatcgccagcgcgcgatgatgttccgaagactataaggcatgttatagtctggattatattgaggcaagtcaccctcccatttattcagagtaaaagtctattctgtgataaatggcgctgattcatagcttaaaaaatacccttgtcaatcaacccattgccgtcgtacttttgattgttcttatttacgcttcctttttccgcaccctaatcgtgacagcatctccagacctgtttaaatatccagtattgaggcaagtgtattttttcaccacgccaggctttcttaactttccattttttgcggcatcattaaagaacagatacccgttatcttaatatccgccacagaattgctctatcatagaaaccgcagaagacgtctgatacttctgtcaggtcatcgtaactcgtccaggtcagcggttttgattacggattgatgatgaaatgagcataagtgttgtacggttggattatcaggatgtgctatgaatatgatgcgtattttttatatcggattgtcaggtgtggggatgatgttctcatcaatggcgtctggaaatgacgctggcggacttcaatctccggcgtgcggcgttgtttgcgacccgtatatttgtgtgaactcagatggcatttccccagagttaacaaggaaatatctcggcgaaaaagccgctgaaaacttacaatcattacaaggctacgatcccagcgaatttacattcgctaacggtgtattttgcgatgttaaagaaaaattatgtcgtgatgatcgttattttggtgtggatggtaagcggagtggaaaaatcaatcaaaccaccacaaagatgttatttatgtgtcgtgagtgatgtcttgtttacattatgttctattcgtcattaacctcttgagcgacagagaggagtggggcattaacgtttatgacggggagagtccccgtcggttgacatttacttaatttgaatatcgacgttatattttttagttttgtttttacgggcgtcgtttcgggtttgcaacactcgcagctcatatttgccagaagcagggagtgagtattgtccgtgactatcgagttctggggaatatctggataaatcaactgaatcatcgattcctggcccgaagaggtaagtatcagcgccttcattagagatactcacatgcactttctgaccttttttggcatagaaggtatatgtatcgtaatcgtatccctttatttcgccggagtactgagcgctgctatggccttttctgaactcaacattgacattcttacccgcagcaaagctcgtggaggttagcagtgcaagcagcaatacagccttcctgatgctcttgattttcattggtagtctcctgttcagaatgagtacgatgaactgttataatataacaatccctaacgggagaattccagtggctttcctgcgttcggtaaaatcacgttgcggcatttttgccggggggattacttataaagggggcatggactcaacaaaccgtagaaatctacagctggctggcttgtggcgcgggtttcattgatgttagcttatgccaaaacctggcatcttaaagagtaaaagtatgttttgtgtgatttatcgaagcagcaagcgtgaccagacctatttatatgtcgaaaaaaaagacgatttttcgcgtgttcctgaggaactgatgaaaggttttggtcagcctcagttagcgatgattctgccgctggatgggcggaagaaactggtcaatgccgatattgaaaaggttaaacaggcattaaccgagcaaggttactatttgcagttaccgccaccacccgaagatttgctgaagcaatatctttccgtcatggggcagaaaacagacgacactaacaaataaccgatatccggcggtggcattatctttgtcggcgcgggttttcatatccacgataaggtgaggggaacgttatgtatcaacatcacaactggcaaggtgcgctgctggattatccggtgagtaaagtagtctgtgttggcagtaactatgccaaacatattaaagagatgggcagcgcagtgcccgaagagccagtgctgtttattaaaccagaaacggcactgtgcgatctgcggcagccattggcgatcccatccgatttcggttcagttcatcatgaagtcgaactggcggtgttgattggcgcgacactgcgtcaggctacggaagagcatgtccgcaaagccattgccggttatggcgtggcgctcgatctgacattgcgtgatgttcagggaaaaatgaagaaagccgggcagccgtgggaaaaggctaaagcgtttgataactcttgtccgctttccgggtttattcccgcggcggaatttaccggcgacccgcaaaatacaacgctgagcctgagcgtaaacggcgaacaacgccagcaaggtacgactgcggacatgatccataaaatcgttccgctgatcgcttatatgagcaagttttttaccctcaaggccggtgacgttgtgttgacaggcacgcctgatggcgtcggcccgttgcaaagcggtgatgagctgacagtcactttcgatgggcattctttgacaactcgcgttttgtaatactttttgccgcctgaaagcggcggcaaaacttgcatcgctgtgccagactggttataaggtgcgttttaacgtaatggcggaacacctgatgagcgatgtacctttctggcaaagtaaaaccctggacgaaatgagcgatgcggaatgggagtcgttgtgtgatggttgcggtcagtgttgcctgcataaactgatggatgaagacaccgacgaaatctacttcactaacgtcgcctgtcgccagctcaatattaaaacctgtcaatgtcggaactacgaacgtcgtttcgagtttgaacccgactgcattaaattaacccgtgaaaatctgccaacattcgaatggctgccaatgacctgcgcttatcgtttgctggcggaaggtaaagatttacctgcgtggcatccgctacttactggttcgaaagcggcaatgcatggtgaacgtatctctgtgcgtcatatcgcagtgaaagaatcagaagtgattgactggcaggatcatatcttaaataaacctgactgggcgcagtgataaatttaatagatgctgatgggggctttcttaatatacgtctggatgctcgccatttcgtagccctgtttttgaaagcgctctgtcataatgagagttacccgataccttattatcaacaggtaactctcaatctttaaaaaacgtctgtgtttttaaatgtgataaaccttataccttgagtacatggagagaataatcgcttatcagacttcaggtacctcaaagagtgtctttttaccgtgtcttttctgatactcattacaggtgttaatcatttttttggccgcttcttttagcaaagaaagcattaaatcatcataatcaacgtagaatctggttgtttcagtttccgtttttatctcaccgatggcggctatttcggtggttaatttcaatttggcggcatcgatatctttattcgcttgtttaaccgtgttagacagggtggtaaagaaattctgcacagattttaacttgttcttcaattctggaatcagttttccttcaactacgcccgcagcaatagaataggaaatgattaatccaaatggaccggcgacgacaccggctgcggcaccggcatatgcttccttcctgattttatctacctgtgactggaaatagctgcttttttctgaaaaatcattggttaactggctatctaacgccagcagtttcccggaagcgttgttgaaactttgtgagcttaccagcagggatttttgcgcttcattcagcttcgtgatgccgtcatccagtaccttaatgagaatgtctttctgggcggatgctttcttctcattgtactcatcaaatagcaaaatatacgctgcgagcaattgcgtcgcaacaccacaccattcatacactgtgaaccgccccggaaatcctggagactaaactccctgagaaagaggtaaacaggatgactaaaaatactcgtttttcccccgaagtccgtcagcgggcgattcgtatggttctggaaagtcaggatgaatatgactcacagtgggcggcaatttgttccattgccccaaagattggctgtacgccggagactctgcgtgtctgggttcgccagcatgagcgggataccgggggcggtgatggtgggctcaccagcgctgaacgtcagcgtctgaaagagctggaacgtgaaaatcgtgaactgcgccgcagtaacgatatccttcgccaggcttccgcttattttgcgaaggcggagttcgaccgcctctggaaaaaatgatgccactgctggataagctgcgtgagcagtacggggtcggaccggtatgcagcgaactgcatattgccccgtcaacgtattaccattgtcagcaacagcgacatcatccggataaacgcagtgcccgtgcgcagcacgatgactggctgaagagagagatacagcgcgtatacgatgaaaatcatcaggtgtacggtgtgcgtaaagtctggcgtcagttgttacgggaaggaatcagggtggccagatgtacagtggcgcgcctcatggcggttatgggacttgccggtgttctccggggtaaaaaggtccgcactaccgtcagccggaaaaccgttgccacaggtgaccgcgtaaaccgtcagttcgtggcagaacgtcctgaccagctgtgggtggctgattttacttacgtcagcacatggcagggcttcgtctatgtggcgtttatcattgatgtgtttgccggatacatcgtgggggggcgggtctcatcgtctatggaaacgacattcgtgctggatgcgctggagcaggcgttgtgggcccgtcgtccgtctggcaccatccattacagcgataaaggctctcagtatgtgtcactggcctatacggagcgactaaaagaagccggattactggcatcaacagggagtacaggcgactcgtatgacaacgcgatggctgagagcatcaatggtctttacaaagcggaggtaatacaccgtaagagctggaaaaaccgtgcagaagtggaactggccacactaacgtgggtggactggtataacaatcgacgattgctgggaaggctgggccatactcctccggcagaagcagaaaaagcttattatgcttccatcggaaacgatgatctggcagcctgagttcacagataaaacactctccaggaaacccggggcggttcactgtttgggttgcttcaaaatacttatcctggctatccataagtaaggttttaatatcgccgactaaaacggaggctgcctgtgaatactcctgtttaaagcgacttaactcttttatggtttcatcaaaggtctgccaggggatgacctgatcgagatatttattataaagatctaatgctccatctgcggtttcgattgcgtttttaactacttctaccgttttatctgcaacgatttcagtcataatcattcgcctctttaaatatataaattgtaatgaaactcctgttttacaactattaataaattttacttcatctaattcatagttagccgggcgggatgcgtcaatgtctttatttctattaatatgataaatatcaaacaatgtttaatgtcattatggcgaatgcttctattctattttttagccgggtgatatttttcatttctgctggatgagcgtcgtcgccagaaggccacgtgagcacaagataagagaacgaaaaatcagcagcctatgcagcgacaaatattgatagcctgaatcagtattgatctgctggcaagaacagactactgtatataaaaacagtataacttcaggcagattattatgttgtttatcaagcctgcggatctccgcgaaattgtgacttttccgctatttagcgatcttgttcagtgtggctttccttcaccggcagcagattacgttgaacagcgcatcgatctgaatcaactgttgatccagcatcccagcgcgacttacttcgtcaaagcaagtggtgattctatgattgatggtggaattagtgacggtgatttactgattgtcgatagcgctattaccgccagccatggtgatattgtcatcgctgctgttgacggcgagtttacggtgaaaaaattgcaactacgcccgacggtacagcttattcccatgaacagcgcgtactcgcccattaccatcagtagtgaagatacgctggatgtctttggtgtggtgatccacgtcgttaaggcgatgcgctgatgtttgccctctgtgatgtaaacgcgttttatgccagctgtgagacggtgtttcgccctgatttatggggtaaaccggtggttgtgctatcgaataatgacggttgcgttatcgcccgaaacgctgaggcaaaggcgcttggcgttaaaatgggcgatccctggttcaaacaaaaagatctgtttcgtcgctgtggcgtggtttgctttagcagcaattatgagctttacgcagacatgagcaatcgggtgatgtcgacgctggaagagctatcgccccgcgtcgagatttacagtattgatgaggcattctgcgatctgacaggtgtgcgtaattgtcgcgatctgactgattttggcagagaaattcgcgcaacggtgctacaacgtacccatcttactgttggtgtggggatcgcccagaccaaaacgctggctaagcttgccaatcatgcggcaaaaaaatggcagcggcagacgggtggggtggtggatttatcaaatctggaacgccagcgtaaattaatgtctgctctccccgtggatgacgtctgggggattggacggcggatcagcaaaaaactggacgcgatggggatcaaaaccgttctcgatttggcggatacagatatccggtttatccgtaaacattttaatgtcgtgctcgaaagaacggtgcgtgaactgcgcggcgaaccctgtttgcaactggaagagtttgcaccgacgaagcaggaaattatctgttcccgctcgtttggtgaacgcatcacggattatccgtcgatgcggcaggccatttgtagttacgctgcccgggcggcggaaaaacttcgcagcgagcatcaatattgtcggtttatctccacgtttattaagacgtcaccatttgcgctcaatgaaccttattacggcaatagcgcgtcggtaaaactgctgacgcccactcaggacagcagggatatcattaacgctgctacgcgatctctggatgccatctggcaagcgggccatcgttaccaaaaagcgggcgtgatgctgggggatttcttcagtcagggagtcgcgcagctcaatttattcgatgacaacgcaccgcgccccgggagtgagcaattgatgacggtaatggatacactgaatgctaaagagggcagaggaacactctattttgccgggcaggggatccagcaacaatggcagatgaagcgagccatgctttcaccacgttatacaacgcgaagttctgatttactgagggtcaaataaatatagcggcaggaaaaaagcgctcccgcaggagcgccgaatggattagcgaccgaacagatcacgttttttcgctttaaacggctgggaaatcaccaccagcactgcgacaatcaggtaagcgataaaaataccgagcagccactgcggcatttccagacctaaaaaatcccactgacgctcggcgcaatcgccagaggcgacaaacacttgcggcacccacttatccagcggcagccattccgggaaacgaaccataaaatcacaggtggcaaacggcgaaggatagagctgaagcatggtgtgctcgtaagttaactgcacaccgcggaacgcactatacaaccagataaccatcgctacataacgcagcggagttttcggggcgatcgcgccaatcagcgcagcacccagaacgccgaataacgcgcagcgttcataaatacagagcacgcaaggtttcagtaacatcacatgctggaaccacagcgccgtcagttccagtgccagagcagtaaacgccatcaacagccacgcgccccggccttgtgaacattggttcaaaaatcgcaacataatcatttccctgcaatatgcatagagtgcgcagtttaaaccaattcattcgctgcgccaccaggaggcagcaaaaataggacgcaattggacaattatcgggcgaaaaggcaaaccgggcatttatatgcccggtaagttgttatcaaagcgttgctatccagcccatttgcataaaccattcggttacaggggcaagcgtaaactcgacgcagagcaagccgacgagtgtcaggacgagggtgtaaggcagggccatccacaccatgcggccataagagaggcgaatcaatggcgcgagtgcagaggtcagcaggaacaggaacgcagcctgaccgttcggcgtagcgacggagggcagattggtaccggtattaatggcgaccgccagcagctcgtattgcttcaacgtgatagcgccactttccattgccgctttcgcttcgttgatataaatcgtccccacgaagacgttatccgaaatggatgacagcagaccgttgaaaatatagaacagcgacagctgagcatgttccgatgcctgcaacacaaactgaataattggcgaaaacagttgttggtcgataatcaccgcgactaccgagaaaaacaccgtcaacagtgcggtgaatggcagagattcggtgaaggctttaccgatagcatgctcatcggtgacaccggtcaatgatgttgccagaataatgactgacaaaccaatcaagccaacttccgccagatgcaacgccagcgcagtcaccagccagacgccaataatcgcctggacaatcagacggattttatcctgacgggtacgctggtggcggctttgatcgtcaaactgttgcaacacttcgcggactttctccggcagcgtttcaccgtagccaaaccaacgcagcttctctaccagcaggcaggttaacaggccacaaatcagaaccggaacggtcaccggcgacatgcgcaggaagaaatcgccaaaatgccagccagccgctttagcgatgatcaggttctgtggttcgcccaccatggtcattacgccgcctaatgcggtgccgacaccggcatgcatcatcaggctacgcagaaagccacggaactgttccagaaccactttgtaatgcttgtcgatatgactatcgtcttgcaggtcggtgtcttcggtacgggaagaggctacgcggtgataaataccataaaaaccgactgcaacgctgatcaccaccgccacgacggttaaggcatcgaggaacgcggagaggaacgcagccgccacgcaaaaagagagcgacagcagcattttggagcgaatgcttaacagcaaacgggtaaatatgaacagcaacagctgtttcataaaatagatacccgccaccataaacatcagtaacagcaagacttcaagatttgccgccacctcttcacggacgtgttccgcgctggtcattccgatgaataccgcttcgatagccaacagaccaccggggagcagcgggtagcatttcagggccatcgccagagtgaaaataaattccgctaccagcaaccagcccgcgacgaaagggctgatgaggaaaattaacgggtttacgattaagaaaatgatgagggcgagtttgtaccagtcgggggactggcccaaaaaattgcgccatagcgcgcggccccaggagatctccatgatggtttcccttaccttacaaataatcaatgatgtttttatgtttaaacgcaaagcttaacggtcaggcaggagtgaggcaagtcttgatagtcaaggggaaagagatgcggaaaatgaagccttgatccctttttcttctttttgtctgctatcagcgtagttagccctctggtatgatgagtccaactttgttttgctgtgttatggaaatctcactatggtcattaaggcgcaaagcccggcgggtttcgcggaagagtacattattgaaagtatctggaataaccgcttccctcccgggactattttgcccgcagaacgtgaactttcagaattaattggcgtaacgcgtactacgttacgtgaagtgttacagcgtctggcacgagatggctggttgaccattcaacatggcaagccgacgaaggtgaataatttctgggaaacttccggtttaaatatccttgaaacactggcgcgactggatcacgaaagtgtgccgcagcttattgataatttgctgtcggtgcgtaccaatatttccactatttttattcgcaccgcgtttcgtcagcatcccgataaagcgcaggaagtgctggctaccgctaatgaagtggccgatcacgccgatgcctttgccgagctggattacaacatattccgcggcctggcgtttgcttccggcaacccgatttacggtctgattcttaacgggatgaaagggctgtatacgcgtattggtcgtcactatttcgccaatccggaagcgcgcagtctggcgctgggcttctaccacaaactgtcggcgttgtgcagtgaaggcgcgcacgatcaggtgtacgaaacagtgcgtcgctatgggcatgagagtggcgagatttggcaccggatgcagaaaaatctgccgggtgatttagccattcaggggcgataatcccttccgtttaaagagcaaacccctcaaacgaggggttttttgttgtttttacagatttcccattcttggcgggcaacgttccagcaactcgatgctgccgtcttcgttttgctgttcgagcatcacatcaaatccccacaggcgatgcacatgcttcaggacttctttgcgcccccgatccagcggtgcgcgattatgtggaatataacgcagcgtcagcgaacggtcgccgcgcaaatccacgttccagatctgaatattcggctccagattacttaagttatattgcgacgataaccggttacggatctcccgataaccttcttcattatgaatagcggaaatctccagataattatgccgatcgtcatccagcacggtgaagaagcggaaatcacgcatcactttcggtgacaggaactggctgataaaactctcatctttgaaatcacgcatcgcgaaatgcagcgtttccagccagtcggaaccggcgatatccgggaaccagtatttgtcttcttccgtcggcgactgacaaatccgtttaatatcctggaacatggcgaacccgagggcatacgggttgatgccgctgtaccacgggctgttataggggggctggaagaccacattggtgtggctgtgcaaaaactccagcataaaacgttccgttactttcccttcatcatacagatggttaaggatggtgtagtgccagaaggtcgcccagccttcgttcatcacctgagtctgtttttgcggataaaaatactggctcaccttacgcacaatacgcaggatttcacgctgccatgattccagcagtggcgcatttttctccataaaatagagcaggttttcttgtggttcggacggatagcggcgcgcttcagcaaccgttttctcttcctcgcgcttcggcagggtacgccagagcatattgacctgactttgcagatactcttcgcgacttttctgccgggctttctcttcttgcagcgagattttttgcgggcgtttgtaccggtccacgccgtagttcatcagcgcgtggcacgagtccagaagccgttctacttcatcaacgccataacgctcttcgcactcggtaatatatttacgggcaaaaatcagataatcgacaatcgaactggcgtcggtccagctacggaataagtaattgtttttgaagaaagagttatgcccatagcaggcatgagccatcaccagcgcttgcatggtaatggtgttctcttccatcaggtaagcgatacacgggttagagttaatgacgatttcataggccagtccttgctgaccgtgcttatacagccgttcagtctcgataaactttttaccgaatgaccagtgcggatagttaattggcatgccgacgctggagtaggcatccatcatctgttctgaggttatcacttcaatctggtgcgggtaggtatccagccggtagagtttcgccacccggtctatctctgccagataaacatccagcaggtcgaacgtccagtcgggtccatcgctcaaacgtgtggtgtccttattcatagaatcgatcgtcgccatacgcgcacctcattgttgtcggcgctctctgtgtggagcacctcatttcaagcatagaacacctgttaaaaaccgcgtcgccggagaatttttttctttgcgatttcttattatcagagtgccactaatccgcttctgaacggaattttatgctggataaaaagggcgttcagcaggagatactaaagacgccatattgccgcagagtcagggagatgtgagccagctcaccataaaaaagccgtatgttgaataatattttcaactgagttatcaagatgtgattagattattattcttttactgtatctaccgttatcggagtggctatgcgagttgtcatactgggaagtggtgtggtaggcgttgccagcgcctggtacttaaatcaggcaggacatgaggtcaccgtcattgatcgggagccgggggccgccctggaaaccagtgccgcgaatgccgggcaaatctcccccggatatgctgcaccgtgggcggcaccaggtgtgcctttaaaagcgattaaatggatgttccagcgccatgcgccgctggcggttcgtctcgacggtacgcagttccagttgaaatggatgtggcaaatgttacgtaactgcgacaccagccactacatggaaaacaaagggcggatggtgcgtctggcggaatacagccgtgattgcctgaaagcattgcgcgccgaaaccaatattcagtatgaagggcgtcagggtgggacgctgcaactgttccgtaccgaacaacagtatgaaaatgcgacccgcgatatcgccgtgctggaagatgccggcgtaccgtatcagctgctggaatccagccgcctggcggaagtggagcccgcgctggcagaagtggcgcacaaactgacgggcggcctgcagttacccaatgatgaaaccggagactgtcagctatttacccagaatctggcgcggatggcggagcaggcgggggttaatttccgctttaatacgcccgttgaccaactgctttgcgacggcgagcaaatctacggcgtgaagtgtggcgatgaagtgattaaggccgatgcgtatgtgatggcgtttggttcttactcgacggcgatgctcaaaggcattgttgatattccggtgtatccgctgaaaggctactcgctgaccattccaattgcgcaggaagatggtgcgccggtatccaccattcttgatgaaacctacaaaatcgccattacccgtttcgataaccgcattcgtgttggcggaatggcggagattgttggttttaataccgagctgttgcaaccgcgtcgtgaaacgctggagatggtggttcgcgatctctatccacgcggcggtcatgtcgagcaggcgactttctggactggtctgcgcccgatgacgccagacggcacgccggttgtcgggcgtacacgctttaaaaatctgtggctgaataccggtcacggcacgctcggctggacgatggcttgcggttccggtcagttgttaagcgatctgctctctggtcgcacgccagcgatcccatatgaggatctaagcgtagcgcgctacagccgtggatttacgccatcacgtccgggccatttacatggcgcacacagctaaggaaacgagatgacccgtccgatacaggccagcctcgatctgcaggcattaaaacagaatctgtccattgtccgccaggccgcgacgcacgcgcgcgtctggtcggtggtaaaagcgaacgcttacgggcatggtattgagcgtatctggagcgcgatcggggccaccgatggctttgcattgcttaacctggaagaggcaataacgttacgtgagcgcggctggaaaggaccgatcctgatgctggaaggatttttccatgctcaggatctggagatttatgaccagcaccgcctgaccacctgcgtacacagcaactggcagctcaaagcactgcaaaatgcgcggctaaaagcaccgttggatatttatcttaaagtgaacagtgggatgaatcggttgggcttccagcccgatcgcgtgcttaccgtctggcagcagttgcgggcaatggcgaatgttggcgaaatgaccctgatgtcgcattttgccgaagcggaacatcctgatggaatttccggcgcgatggcgcgtattgagcaggcggcggaggggctggagtgtcggcgttcgttgtccaattcggcggcgactctgtggcacccggaagcgcattttgactgggttcggcctggcattattttgtatggcgcttcgccgtccggtcagtggcgtgatatcgccaataccggattacgtccggtgatgacgctaagcagtgagattattggtgtccagacgctaaaagcgggcgagcgtgtgggctacggcggtcgctatactgcgcgcgatgaacagcgaatcggcattgtcgccgcagggtacgccgacggttatccgcgccacgcgcctaccggtacccctgttttagtggacggcgtgcgcaccatgacggtggggaccgtctcgatggatatgctagcggtcgatttaacgccttgcccgcaggcgggtattggtacgccggttgagctgtggggcaaggagatcaaaattgatgatgtcgccgccgctgccggaacggtgggctatgagttgatgtgcgcgctggcgctacgcgtcccggttgtgacggtgtaacttgttgtaagccggatcggaggcaacgtcttctgggtgcaaaaaaatcatccatccggctggtcagcaactgtagttgttaatgtgacagagccattgcccatgatagtgtccattaaaaggatggacactatttccccggaacctgaactcaccgcacaggcgttctacataaaacgcttacgcttcattgttgactcgaactcgacttcagataaatcacgctttacccttgatggagcctgtacatagatttgtgtaattgcctgattttgatatgttcaattcaacatcaaatgaaggttaaattatggacgacaaacaattgcaggctcaggctgcgttcagcaaagcatcgcaaccggcgatagatgcttcattaaatttaagattcagcttcctcttcagccacccgtacgccaatcttcaacacttcattatcttctttctcggccaccgtccagatcatcccggcaaactctacctggtcaccgacaaccggtgccgcgcctaacaactgctggacaatttcacccagcgtttgctgcttatcacgatattctcgcccgtcttccaggccatatatcagcgcaacatcagcatatttggcgctggcttcgagaatgaagtcaccaaagaagcgttgatccagcgcgaccggcggcgactggctgaacagtttaccgagcgccggaagatcgcgttcccgaccaattacacacaacacatcgccttcgcgcagtcgggtgctgccggtaggatgaagcaactggttatcacgaaacagtgccgcaatacgcgtctcttttggcatatgcaaatcgcgcagtgccgcgcccacgcaccatttatcggcactcaattgataaacaaactgctcccacggattttccggatgaatatccaggccaacgcgtgacaccggacgtcccactggcggaaccaccactttggcttttttagccgcccacgagagtgatgttccctgcaagagcagtgaaaccagaaccacaaagaaggcgacattaaagaacagacgtgcattctccagccccgccatcatcgggaacacggccaggatgattggcaccgcgccgcgtaatcctacccagctgataaacacgcgctcacgcagattgaaaccgcggaaggggagcaatccagcaaataccgaaaggggacgggcgaagaatatcatccatgcggacaaaatgagcgccggaatggcaataggcagcagatcgcttgggttaaccaacagccccagcaccaggaacatggcgatttgcgccagccaggcgaggccgtcgaaattttgcaggatgccgtagcggttgcgaatagggcgattacccagcagaaaaccgcacagatacaccgccagaataccgctaccttccagcgcagtagttaatgagaaaatcagaataccgccacttaatgccagcaatggatataatccggcgggcagggcgatgcggttgatcatttgcagtagtaaataaccgccgccaagacctattacaatgcccagaccaaattgttgcagaatatcgacaatgaacatccagctaatattgctctcatgatgctggatcatcgcaattagggtaatcgtcagaaagaccgccattggatcattactgccggattcaatttccagcgtcgagccaacacgttcgttaagccccttaccacccagcagagaaaagaccgctgcagcatcggtagagccgacgatagcgccgattaataagccttcaatcaaatcaagattaaacagccacgccgccatcatgccggttaaaccagaggtgataagcacgcccagcgtcgccagcgacagtgccggtcctaacgccacacgaaaggaactggcctgagtgcgcatcccgccgtcgagcaaaataatcgccagtgccaggttacttaccatgtaggcgaaggggtaattatcaaacgggataccgccgacgccatcgactcctgccagcatgccgatcgccagaaaaataaccagaataggaatgccaagacgggaagaaaatgaactaagtaatatactgctggtgacaaggatggatcctaagatgaaaaggctaattattgttgtggcatccaacggtcggttactcctgattacgctgtctcttatataaaccctaccatattagcggcagagacagcgttttacttagccctgaagcgtgatttttttacattttaagaacaggatgaccgctaatcgtcaactgagtgccttcccgggtgttattcagaatggcatgtgcgcccaacggcagcgtaaccgtgcgttgttcatgaccaaaatcgaggccggtaatgagtggaatcgacaggcgggaacgcaaaaacgcgtacactgactccaggttgtaacctgcgtcataatcattgggcgtgctgccgctaaagctaccgagaataatcgccttctgacgtggcaaaattcccgcatgatagagctgcaacagcatacgttcgacccggaaagggtgctcgttaatatcttccagcaccagaataccgttctcaatttttggcatccacggtgtaccgatcagtgaaatcagcatcgcaagattgcctccccacaacgtgccttcggcccgacatgtcgggccttccccttgccattcaatggtgaaggtttcattgcgtaacgccagccagaaatggtgctcggtaaaggcgttcagttcatccgcgccaaagtttgctaccagcatggggccgctaaaggtgatgacattgccatgcgccagaagaccgcactgaatggcggtaaaatcgctatgtccgcaaatgagcaacgggtcatgttgttggcgagccaccagtgcctgccagtcaatatctgccagtaaacgactggcaccgtaaccgccgcgtacagccagcacgatggtgttgggggtagtcagtctggcaagggaattgagatcttccagacgctctgtttccgtacccgcaaaacgctcacaacgacgggcaataacctcgacgttattgacttgatgccccgcgtcggtaaggcgctggataccacgcagcgcggcgtgctgtttaatgcagtaacccgatggggcaattaagtgaaacagagacatggcaattccttgctgacaacagaaacgaaatgtatatcatgccgcttaggtgtgccgttgtcacctcaacggcgattccaggctataaggatagaagaagtgaaattgagatggtttgcctttttgattgtgttattagcgggttgttcatcaaagcatgactatacgaacccgccgtggaacgcgaaagttccggtgcaacgtgcgatgcagtggatgccaataagccagaaagccggtgcagcctggggcgtcgatccacaattgatcacggcgattatcgctatcgaatcgggtggtaatccgaacgcggtgagtaaatcgaatgccattggtttgatgcagttaaaagcttcaacctccggacgtgatgtttatcgccgtatgggctggagtggtgagccgacgaccagcgagctgaaaaatccagagcgtaatatttcaatgggggcggcttacctgaatattctggaaaccggcccgctggcaggcattgaagatccgaaggtactgcaatatgcgctggtggtgtcatacgctaacggggcaggtgcgctgctacggactttctcgtcagatcggaaaaaggcgatcagcaaaatcaacgatttggatgctgacgagttcctcgaacacgtagcgcgaaatcaccctgcgccgcaggctccgcgctatatctacaaacttgagcaggcactggacgcgatgtaaatcagtcgcgcactttgtccgctttttcccgggcttctcgctcgagagagaaaataatccgctgtaattgccgctccaccgtcgggctgacgttaagaaaacggaagctcagacggggagtggtgatggtttcattcttgccatcaatcactttgcgctcgctgatggagattaactgggcgtcaaagtgaaaaacaccccattgccccatgttgacttcaatctgagcgaagcgcatgccttcttgtaattcggcaggctttgctgtttccagtaatgcgcccatgccgcctaacgacaaatcatacaggcggaaacgtaacgtactgttatccgccagtttggtctggcaaaaataaggcggatggagtggggcggagatgcggaaatatcggcgtcgttgtacaaaccataaggtgggaggcggtacggtaataaatgccggaagctgcaagtattcactctgctgtagttgttcaacagtaaactcgactttcgcaccctgagtttcggcggtaatggtaatgtgctgtgcctttagcacggcgatgttgtcttcggcttgactgccgaaatccagcaccagtttatccggggttattgccagtaatttgctgatcagctgcccgccattccaactgagacgcaaaggaattgcggctttgtgcaaatcgcgtaacacgcccaggacggctaacggattttgtttcaggaactgctcatggtaatgactcacgcggaaaaactcctgactgacaaactgtctttggtttatcggtcacagttaacaaaacttaatacaaatgcgtgaatattttttacatgttgttcttaaatcagccgacatacgcccagcatcgatcccgcccttgcctatacttagagcgttgatgtaagcatttcttgcgtccgattcatcgaaacgagggcctgaacatgggaattattgcctggattatttttgacctgatagccggcattatcgccaagctaatcatgccggggcgtgatggtggtggatttttcctgacctgtattctcgggatagtcggtgcggtggtcggcggctggctggcgaccatgtttggcattggcggctccatcagtggttttaatctgcacagcttcctggtggcggtggtgggagctattctcgttctgggcatattccgcctcctgcgaagagaataagattttcataaggcggatagcgatacagatgccgctatccgctttcacatcagaacgtatactcgacacctgctttacgggtgaaaaaaatcaatatagcacttcgatatccgataaagtcggttcccggtaacaacaacagaatccttttttaattattgtttcgttgtttttggtgtgattcagaaaataaatattttagacagtagccagtcaggcgttaaaaatggggcggatagtgaggcggttttggctgcgcttattgaacatttagaattgatcaatccttctggcagattaagccaaaatacccgttcggcaatgcttcagttacgcgaagaggaatggtctgaattctttttttggttgctaaattctctggagtgtctggattatgtgattattaatttaactccagaaagcaaaaaaacgttgatgagtgaacaccgtaacaatattcaggtagcaattgatgctttatatagccaacgtcggcgtaaatcgccgggtgatgaaagtgaaacacttacccgtagaaatgacgctatcttcggcaaccacgtatggcaaacatttgcgcaatacttcccgccaggacttgaaaaaccgtctgtgtagaaaaaaccatagctatggtgttatctgccgacaacgccatccggagaagccgaatgacgttgtcggagtaagcgctggttaaggtgtgggttgtgcctctttggttgagggttgcgtcgttgctgacttaacggtcggacgcgtcgccggaacattgtcacacggttgctctttcgggcagatcaaatccagcattttcagcgtcacgccattggtccagccaaagccatcctgtaatggatattcgccaccgccgccctccgttccggtggtgctgacatcatatttttccaccagctttttctcccggtcataggtgtgctgaacattggtcaggaagtgccagctaatgtccatcgccacctctttttgcccgtagttttgtaatccttctgtcgcgacccactgtaacggtgcccagccatttggcgcatcccattgttgcccacttttcaccgacgtggtgttcaggccgccgggttgcagcagatgtgttttcgtcgccgtcgccattttgttggcgcgatctttcgctgccgcattgacgtacagcgggaacagggcggccgcggttaactgattgcgcactttatgacttttcaggtcgtaatcggcataccagccttgttgatcgttccacaggtatttttcgatccctttttgacgggcatttgccagcgtttcgtactggtttgccatcgcgttatctccggcagctttgctggcgcgggcgaggattttttccattttaaacatcaggctgttcagatcgaccggtacgatgctggtggtgcgtaaggtatttaactgctgcgggttgtccatccagcgcgagctgaaatcccagccagacgcagcggcagagcgcaggtcgcggtaaatttcagtggcaggtcgattcggattgcttttggcggtggcaatatcttccacccatgactctggtcgtggcgtatcgcgatcgtcccagtagcggttgagaagggtaccatcctgaagtttgacaacgcgtttttcctgttgtccggcttgcaggttttcaacaccgtccatccagtaagcatattctttttgcatttgcggcaggtattgcttcaacgcggcatcgccttcatgctgcgccagtaactctaccatcagggcaaagaagggcggttgcgagcggcttaaatagtaactgcggttgccgttgggaatatgaccgtaagtgtctatttcatgagcaaaattggccaccatattcgcgactttatcccagtgaccgctttcggcaagtcctaacatggtgaagtaactgtcccagtaatatacctcgcgaaagcgtccgcccggcacgacataaggttccggcagcggtaacagagaatcccatttttcggtgttttcggtagaacgcgttaataccggccaaagtccgtcaatatgttcgcgcagtgactgcccctctggcggaacatatttctcgccttctttcggcagggtgaaattgacgttaacgaaatggcgcagatcaaatccgctctggttttgctgcatccgataatcagcaaggatcatcagcggatcgctgttcggcacggcatcggcaaaggttttttggtccggaaaaagtttggcgttttgcacatcattaaacagcggccctaataaaatatcaggcggctgtggtgttaccggtgtttcttctgcctgcaccgatagcgcagcgaaacacaaaaagatacaggctggaattaacgccattttttgcgggcgagaaggtgcgggggatttcatcaatcattctcctttggcgaaaccgaataaaacggtattcaagtatcagaaaaccttagttcaggatcgcactagctgcatgatcgaaatctcattctgcgaactgtcaggcattttagaaaagggaatgtattgattcacttgaagtacgaaaaaaaccgggaggacattggattattcgggatttggcgggattagattttgtggggcttgcaagcctgtaggacagattttagccgttacatcttgaaacgcgaaagattgttggaaacagcttttgattcattaaagacacgaaaagcaattacttcacgcatcatttcaagtacagcttcaaaaatgcttcaaaaacggtaacaaccaggctttcagcaagtgatgtgtgtcaaaaataatcatcactgtttgggtatcttacatatgtaattacctggagtgaagtttatgtcttagctattacctggttgttatacagctttctttacatcgttttctcttacagggaaattatgttctttgccttcatactgagacaaaatctctctcactttttccggtggtaatgcctgaagagtttgcagggttttctgttgctccacagtaatccctaatgcctctaatgccttatctttactgacaattgtaggcataagtcctttaatccctgctacacgaatgatctccacagctgcggcctgctcatctggtgttaagaagctcattgcataaattagcctctcatcaactgtatgggcgattgatgtatgcactggtttatcagaaagtgaggctcctttaatggccctgcgtgtttcttctggcagactgttgatgtgatactcataagcgacacctttcccaccgtgacgctgacgttttacccaatcttccgccacagctttcctggtaatgttagtcgccaactttggtacaccaggcatcccttccagctctttcgcattaaaccattctttgatttcaaaagacatcatttaaaatcctagtgatttcaatagagacaaaataaattcatataaaaatcatgccgttatataaaatcatggcaaatcatttcaaatcactattgatttggaagtgattccacactacattgcacgatatgccgtgagctactttatagcgtagctcacgggggaatctgaaaggattacatgaaatgcatatgaataaaagaactaaccgccaagattggcacagagctgacatcgttgcagagctacgaaaacgcaatatgtcactagctgaattgggaagatctaatcatctttcgtcttcaacattaaaaaatgctttggataagagatatccgaaagcggagaaaatcattgcagatgcactgggaatgacaccgcaagatatttggccgtctcgatactaggtgcgctatgaaagaatggtatacagcaaaagagttgctcggtttggcaggtttaccaaagcaagccactaacattacacgtaaggcacaaagagaaggctgggagttcaggcaggttgcagggactaaaggtgtatcatttgaattcaatatcaaatcattccctgtcgcattacgtgctgaaattctgttgcaacaagggagaattgaaaccagtcaggggtattttgaaatcgcccgccccacgctggaagcccatgattatgatcgtgaggcactgtggagcaaatgggataacgccagcgattcccagcgcagacttgctgaaaaatggttgcctgcggttcaggctgcagacgaaatgctgaaccaggggatttcaacgaaaacggcatttgcgaccgttgcaggacattaccaggtcagcgcatccactttgcgagacaaatattaccaggtacagaagtttgcgaagcctgactgggcggctgcgcttgttgatggacgtggtgcatcccgtcgcaacgttcacaaaagtgaatttgacgaggatgcctggcagtttctgattgcagattatctgcgaccagaaaaacccgcctttcgcaaatgttatgagcgtctggaactggcagcccgcgagcatggctggagtattccctcccgtgccacggcctttcgccggattcagcaactggacgaggcaatggttgttgcctgccgtgaaggtgaacatgcactgatgcatctgataccggcacagcagcgaactgtggaacacctggacgccatgcagtggatcaacggcgacggttatctgcataacgtctttgtacgctggtttaacggtgatgtgatccgcccgaaaacatggttctggcaggatgtgaaaacccgaaaaattctgggctggcgctgcgatgtgagcgagaacattgattcaattcgcctctcgttcatggatgtggtgacacgctacggcatcccggaagattttcacatcaccattgataacacccgtggggcagcgaataaatggctgacggggggcgcgcccaatcgttaccgctttaaggtgaaagaggacgatccaaagggactgtttttactgatgggcgcgaaaatgcactggacaagcgttgttgccggtaaaggctggggccaggcaaaacctgttgaacgtgctttcggtgttggtgggcttgaggaatacgttgataagcatccggcactggctggcgcatatacggggccaaatccgcaggcaaaacctgataactatggcgaccgtgctgttgatgcagagctgtttctgaaaacccttgctgaaggtgtggcgatgttcaatgccagaacaggccgtgaaacagaaatgtgcgggggcaaactctcgtttgatgatgttttcgagcgtgaatacgccagaacgattgtgcgtaagccaaccgaagaacaaaaacggatgctgttactgcctgccgaagcggtgaacgtttcacgcaaaggcgagtttacgcttaaagttggcggctcccttaaaggcgcgaaaaacgtttattacaacatggcgttaatgaatgcaggcgtgaaaaaagttgtggtcaggtttgatccgcagcagctacacagcacagtttattgctacaccctggacggtcggtttatctgtgaagcggaatgtctggcacctgttgcatttaatgatgctgcggcaggccgtgaatatcgccgccgccagaaacaactgaaatctgcaactaaagcagccattaaggcgcagaaacaaatggacgcgctggaagttgctgaactgctgccgcagatagccgaaccagcagcaccagaatcaagggttgttggtattttccggcctgtgggtaacacagtacgggttaaatatcgcacccccgatgataaatacgaacccgctcgtgatgaatatctgaatcagtcactggatattctggaacagaaaagacgtaaaaaagccatttaattaacgtttaaacaaaatttaattacgaggttattcagatgaatatttccgatattcgcgcaggactgcgcacgcttgtagaaaatggagaaaccacgctgacacgcatcgccagtgaatcaggcgtggccctgagcacagtcagtggttttgtgaatgataaatataacggcaacatggaatcagtcgggcgcacactggaacgctggctggaaaactatcaccgcgcagaagaactgccggaacccccgcgttttgtggaaactgcaacagcccgtcaaatctggacaagtatgcgttttgctaatctgaccggaaccattgctgttatctgcggtaatccaggagtgggtaaaagcgaagcagcccgtgaattttgtcgcactaataataatgtctggatgatcaccattgcgccatcccgtgccagtacgctggaatgtctgactgaacttgccgaagagttgggaatgaataatgcaccatgtcgcaaaggaccgctttcccgtaacctgcgtcgccgcctgaaaggaacgcagggactggtcattgttgacgaagctgatcaccttgacaccgaagcgctggaagagctccgtctgttacaggagtccgcctgtattggtcttgttctgatggggaatcaccgtgtttattcaaatatgaccgctaatggcgacagaacaattgagtttgcccgtctgttttcccgtattgcaaagcgcacagcaattaataaaaccaaagaagacgatgtaaacgcaattgcggatgcctggcagattaccgggaaaaatgaacgggaattattacagcagattgcacaaacgcctggtgcgctccgcattatgaatcaaacgctgcgccttgctgttatgaatgccttcggtaaaggcgaacgtgttaatgaggattatctgcgtgaggcttacaaagagttagaccaggacgttgatgtttcgatgctgctgggtgtgcaaggggatgctgaatcatgatgtcacggaatatcaaaatggcgacggaagtaaagacctggttacaggagcgcggcagccacgtcaacgaatcctggctgggcgtggcccgcccggtgcttgaaattacctgcccgccaccggagctggtcagaaacgctgtcaggattatggagcataaatcaggggttgcccgttccgtatggacggcccgccttaatggttgccagattatctggcgttaataacggcttatttatttgtgaggaataacaaaatggcaaaagtaatctttgaatttaacaatacaagaaatattgagtttcaggaaaatggaggttttgccgtaaatatgaatgtgcgactggaagaatcctcacctgaggaccagaccgggccacatgatgtaatggcaggcatcatcaagagcatggctcctgaaatcattaaaaaagcgaccgaggatttgttgaaatcagccagggagcttgggctggaagccgaaggcgagttattccggtataacccggatgcagctaaatattaattcgcaaaggaacgctgacaatgaaagccaaaatcagaaacgaaattcaggcattaattcggattaaagagcgtaatagcaatggtggagacttgcgcgaatttatttgcgcgcgcgaagttgagggatatggcgaaaagacttacctgattgcattcgaccattacagcatttgtgcgcgttattgcggggaggcggtattccgcgccattacgtttggcaatgccttcaatgtggatttatgggaatacgtcatggaccgtgaatacatcagcgcgtcagacccggacgcacgggagcagtggcagaacatctggcgcgattaccggcaaatggcgaaaggctggacgcaggggacgtattcttcccttgccctgaaagcggttcagttatcgctgcggcatgttccgtcagtacggtttgaacttgcggtgcactgatacaggagggcgacatcatgataccccctcgtaaaagatggtcacgtgaagaccgggaatttatcgaagccagtgtcgggaaaatgactgttgaagaaatggcgaaaaaaactgaacgttgccccaaccgccctacaggcacatgccagaagacacggaatatcgttgtgtgcataccgggtcagtgagcacgacaaatatttgtgtcgtgaactttataaagaagggctggatattcatgtcattacccaaaagatggaattaagcaatcgtgctgtatccagcattgtatacagcgaatattaattaacaggagctttatttatatggctaaaccagcaaaacgaatcaagaatgcagcagcggcttatgttccacagtcccgcgatgccgtggtatgtgatatccgccggattggtgacctgcaacgcgaagcggcacgacttgaaacggaaatgaatgacgctatcgctgaaattacagagaaatacgcctcacagattgcgccgctaaaaaccagtatcgaaaccctttcaaaaggcgttcagggatggtgtgaagcgaaccgtgacgaactgacgaacggcggcaaggtgaagacggcgaacctggtaaccggcgatgtgtcatggcgtcagcgcccaccatcggtaagtattcgcggtgtggatgcggtgatggaaacactggagcgtcttggcctgcaacgctttattcgcacgaaacaggaaatcaacaaggaagcgattttactggaaccgaaagcggtcgcaggtgttgccggaattacagttaaatcaggcattgaagatttttctattattccgtttgaacaggaagccggtatttaatatcaccattaatatttaattagttcactttcttttaattatggcgcgatgcgtcaggggattgctcgcgcctgaaacagattactgaggaataaaaaatggttgatgcaaaagttctgaacggtgtcagtacattattacgggcttacggacgtctgacctgtggcgttctggcggaaaaaatgaatatgccaccttcttcaatggtgtatttcctgcgtgatgcggttgatgccggagttctcactgaatgcaacggattttatgacgttccgcgccctcgtccgacgccgccagtaagacgaaacgcaacggagcaccccgctgttgatgatgctcaatggtgcgctttccgccgctctttgccctggctggaaggcaatgccattccggcactggcaaaagaatttgcgacaggcgtactgacctgcgagtcggtttacatcgttgctgaagtggatgacgagatgtgcaaacaggggatgccccgttttgtgatggcgtatatcgatatccgactgggacgttttatttgtggctccagtggctggaatatcaccgaccacgtcctgcgctatctcattcttgattattcaccggttccggcggcaacacaggatgtcagcgagcatggttaagtcaattggctttgtcctgctggttggtacttgcgggaatgatgcctgtgatgccattccggtaacagaaaaaatctggcccacagaacaggcatgtatgcaggtgatggagcgcatacaaaaacgttatcccagtgaaatcttttattgcgaagaggtattaagaaatgaataacgcagagaaaaatgaaattaaatccgcatccgccagcaccagaaagcatcttcatgatttttatgttgcctataaccagtggttaaaaaatggtgtaccagaaacagagggtgaaatatttgttcaatattcaggattatgtacaaatgcttgtcgttattttgacgaaatcggagtggataccgaagatatattagaacaattacgtgcagattttatcgcgaacgagttggatgaattattacctttcaatgaaagtggaacgcactatcatgaggaatgcagacttggcagatgtcacctgaattctgctcgtgtggcatgggtcgaaaaacactgcattaaggagatgggacataatgagccgcacatccctgattaaattaattcatgtcgcccgtcgggaattgcaacttgacgatgacacttaccgcgcctttctggtgcagtgcacgggcaaaaccagttgccgcgagctgtccgttgcacaactggaacgggtgctcgatgccatgaaagagcgcggttttaagaagcagaaaaaacatccccgccgtcgctttaaggggcatgtcacaccacgcgagaagatttacaaaatctggcagcagatgtttcttgatggtttcgtctccgatatcagcgacgccgcgctggacaaatacgttgaacgcctgacggccagacgtaatggcggtcagggtgtttccacgctggcctggtgtcacggggaatcgttgcaggttgtgctcgaaacgctcaaacagtggcacatgcgctgcatccgtgaagcctttgcccgacatggtgtgcctttacctgtaagcccatccgggcgggaactgcgcggctatgatgcactgaccagtgcatatgcccgcgcacgaaacagcgggagaattgctgtatgaaacagatgaaagagcaggatttgttcgaagaccttcgggacgacagcgttctggaatatcttcatgattaccaggaaaacaccgcttatccggcgttactttctgaactgaacgcactgctgcgtaaagagctggcccggattggcgcagaccctgcccattcccttgagctggttgtggcgatttgtcgccatatcggcgggatgcaggtttatgttccgagggggaatattctggagaatcttgtccgggatatgcgtatctggcgtgattttaacggccataatattcctgaactggttcagcgttacggggtgacgtataaaaccgtctacaaggccatcaaacggatgcgacgtctggagcgcaataaataccagccggatttgttttacctctccccgaacctgcctcaccccgttcgtcgtccgccacgacgcccttaatcaatgaagccggtaaatccggctttttttatgcctccggcaccatgaagcagaccacgtttaactctgcttcacaggtgctttttatggaaaatctaaaattatatctggcctttgagcgtgcgctgaattttattctgcgtcctgatatcgaaggcgtctatgtcaatgaccccactgaccgtggcggagaaaccaggtacggcatctctgaccgccgcgacggtgtgattgacggcaaaactgacgtcaacggtgatggtaaacccgacacccgcattaaggattttacccgcgaacaggttgcgcagatttactggcgcgattactggctgcctgccgggtgtgaccagtggcctgacagagtggcgctttttgtgttcgatgcggcggttcagcatggtgttaaaaaagccatcaaacttttgcaggaagccactgatatcaatgccgatggcatcatcggcccgcgcacccgcagggccgtgaacctggctgaccagaactggttgctgacccgctgtattgtccgtcgttcccgcttttatgccgaaatcatcaaatcaaaacccgcccagggcaaatacctgaacggctggtttaaccgcatggaaaaactgaccgacgcctgtctggaaatcatcgacaacgcgccgtccaccacgcgggggtgatatgggcaaaggctgggatgcctcactgaaagccgggcggcgtgaccgcctgcgtcaggaggttctgcaccgcatggccggaggtccgcccccgaaaccgctggactataccggccatgacggcacacacgccagctactacatgcgtggctggaactccgtggatacacgggacattttctggcagtgccagaagtacagggaaaaattcaatgtggaaaaaggtaatgaacaaaattttaaactgtgtgactggctgctttgttcccgactgatgagaaccccatggccgctggccggactgacactctgcatgttcatcatcagcatgttatgtggctggcgatcgttcgtgttgatgttgttgtcctttgccggggtggtgttgttttcatacagcgcaagcctcgggaatgtgccatttcgcctgctgcctgaggtccgttaccgggcttttggtcgccacatcatcgtgtggtcatgggtggtctgggcgctgggatatttctgctgcgtcttcagcacgctgatgatggtgtcaccggtgcatccggtgttctggctgtgtggtggctgttgcggcggtctgctctgtcttcagcgttatctgtatggaggtttcccgtggatccgttaaccctttcaggcatcgcctctgttctgctgaaagccgggccggggctgattcgttccgtcgggcgctggtttggtggcagtacatctgccgccgctgactcggtggccggtatggtggaaagcgtccgggaaagcctgccggtggctgaacagcaacgcattctggaacaaaaactggtgatgctgtcaccggagcaactgatgcagctggaaaccctgaaagttcagctgcaacagctggaggtggagcggcagaagctggtgctggctgaccagcaggccgcacaccacgaacagcaggaaaccatccgcaatggtgacaacgccacggacagctatgtgcgccagacacgcccgctgctggcccgcctttcctgttacagcagtctggcctatgtgctgttgctctcctgcggccagattgccggagccattgccggtgccagaggtatcacgctgcatatgccatcaccggactgggatatcacgctgatgttgcttaccccggcgctgggctatctcggtgtaagaacccttgacggctttgcccgttacagcaaatcaagccgtcacaaaatgtctgcggggccgaaatgaccgacgaaatcgatcgcatcagtgaagtggttctgaacgagcgtcagagcgtcgttaaagcctggcagacacggacaaaagaagcgccccacagccggggcttctgcaatgactgcgggaacgttattccggcacagcgccttgcggcgctgccggatgtggtgacctgtattgactgtcagcagatgcgggaacgcaggaggaaatcgtgtcctgggaaatgatccgggccaactggcccattctgtgggcattgctgatgacaggaataaacctgcttcagctgattctggcgaaaacctacgtcaaacgcgaagagtttgattcactccgttcccgcatgtcggtgatggaaagccaggtacaccatttacccgaccgtgatgagttccaccgcctgcaactggatatcagcaacctgcggggagaaatcaaagagctggggccatccatccgccaggtatcccgcatcagcgatttgttattagagaacgagttaaaggaaaaaaaataatggcgatgaaagagatcctcactgaagaccgtcgtcttgtgttgctgcgttccctgctggactgtggcgacagcgcgaatgaatccgtgttgcagacctgccttcaggcctacggtcataaggtatcccgtgatgtggtgcgcacccagcttgcatggctgcgcgagcaggggctggttcgtctgtctgatgtgggcggctgttacgtggctgaaatcaccggcagcggtgaggatgtggcaaacggcctgtccggcgttccgggcgttaaaaaaccccgtgcgagggactgagcatggcccgaaaactgaagccgttaagtcgcggagaacgggccgtcgtgcggcagctagcgtactgtcttgtgctcgcggatattgagcaaaacgccattgcctgtgcatacgaacaacagaccggaaagccctggaacccggatgcaccggatacccccatgaaacgtgccctgcgttcatcaccggcatgtgcgcggctgtggaagctgctgggtaaggatatccgctccgttcgcgaagaaatatacgccggtctgaaaacaccgggaactgaagacgggggccgtcgtgaaccgtaaaaagaatccgataagtaaagcgtcccgtgatgaactccgccgtctggcgcacaacctgacatggcgggaaatccagagcggcgcactgaaatctgcatacgaaagtttacagcgtagtgagcaacaggagggcacacatggaaaatgaacaacgccccacccgtggccgtctttccaaagtggatttactcccggacagcatccgggagcagttgcatcagatgctgcgggaaaagcggcacacgcaggaagaaatccgcgaagccatcaacgccctgattgacgaacacaacctgccggaagagatgcagttaagccggacgggcttaaaccgctatgccatccgcatggaaaaagtcggggcaaaaatccgtgcctcccgcgaaatggccgaagtctgggcggcaaagctgggttccgcgccgacgtcagacgtcggcaaactgctgatggagtttgtaaaaacgctggcttttgaaacgtccatgtcgatggcagaagacgacaagcccgttgcaccgaaggcgctggggcaactggcgctggttgcccagcgtctggaagcggcagccatgaccagccataaacgcgagaaagcgatccgtgatgcgtttgcgcaggagatggcagagaaaaccgaagaactggtcagaacgggcggtctgtcaggcggtgcggctgacaccatcaaacgagacattctggggattagcgtatgacacaaatggatacgttcagtgaatatgatgttctgctgccgtatcagaaacgctgggtggcggatgatgccgacctgaaaattgccgagaaatcccgccgtaccggtttaacctgggcggaagcggcggatgcggcactgacggcatcactgaagaaggaagacggcgggcgcgatcacttttatatcggttcgaataaggagatggcccgcgaatttatcgacgccgtggcgatgtgggcgaaagcgtttaatgcggcagcggaagaaatctgcgaggaagtgatcaccgacgaagacaaggacattctgacgttcgtcgtgtacttcgccagcggttttaaggtcaaggcattgtccagcaacccgagcaacattcgcgggatgcaggggaatgtcaccatcgacgaggccgcgttccatgaaaaactggacgagctgctgaaggctgtgctgccgctgaaaacatggggcggcaaaattcgccttatttccacccatgacggcgtggacaacctgtttaaccagctgattcaggaaagccgcgcgggcaaaaaagattacagcattcacaccatcacgctggatgacgcctgcaatgacgggctgtaccggcgtatctgtcaggtgcgcggcatggtgtggtcaccggaagccgaagcggaatggaaagaaggtctgctgcgaaataccgccacccgcgaagacgcactggaagaatattactgcgtcccgaaaaacggcggcggcacgtatatcccccgctcactgcgtgaacgtgcggcctgtggcaccgggaaagtgttgcgctttaccggcacaccggaatttaacgcactgacggaaagccagcgccgggcagatatccgggaatggctggaaacagtggtgcgccctgaactggaaaaactcccgaagaacctgcgccactgtctgggggaagactttgcgcgttcgggtgacctgaccgtactggccccggtgacggtgaacgatgacaccacccgcgaggtgccgtttctggttgagcttggcaatgtgccgtttaaacagcaggagcaggtgctgttctggctttgcgatcgtctgccccgccgtgacggcatcaaaatggatgcgcgggggaatggtcagtatctggcagaacaggcggcggagcggtacggcgacgaagtggaacaggtgatgctgtccgtggcgttctaccgcgaaaacatgccccgtttccgtgcggcgtttgaagatgatgagctgatccttccgaagcatgaagacgtgatcaatgacctcggggccattcagttactgcgtggcgttcccggcattgatgattcacgaaccagaggcagcgacggtcacaaacgtcacggcgacgccgctgtggccattttcctgggcttccttgccagcaaggatgactgccaccgttacgagctgcaccgcctgaaccgcccggcgaaaccggaagaacgcaacgcgcgccgccagatgaagctgacgcgcggcctgaaaaatgagggaggtttactgtgaacctgaaacaactggccggggccgttcgccgtctgctgaacccggcaaccggtgaggaagacacgctgaaaaaagaggcgctcaacgaagcacaggcacgtccgcgtcatgccagtgtgcgttcggcctcgccgggcgtcagcattgcttccgggctgaatcccggcaggctggcaggcattctgcgcaatgctgccgacggcaccacgcgtgacttttttatccttgctgaagagatggaagaacgcgatttgcattacgcctcggtgctgcgcacccgcaagctgacggtggcgggtatcgaaccggtggtggtggccgccagtgatgacgatgctgacgtgcagctggcggacgccatccgtgcactgatggaagcaccgcaaatccctgagctgatgtttgatctgctcgacgggctgggaaaaggcgtggcggtctgtgaaattttgtggaacacccgcaacaaccactgggtgccccgtgattatgagtgggttgatccccgttttctgaaagccgaaaaacccacgctgcgccagttccgcctgctgactgacgatgaaccggtggatggcgtaccgctgacaccgggaaaattcattgttcaccagccgcgcctgaaatccggtctgccgctgcgtaacggtctggcccgtctggtggcggtgatgtacatgctgaaatcctttaccgtgcgtgactggtgggcattcgcggaaaagttcggcattccggttacggtggggaaatacggtcccaacgccacggaggagcaaatccgcgtgctgattgacgcgattgcgtccattgcctcggatgccgggtgtgccattccgcagtccatgcaactggagatgcaggaaactgccagccggaataacggcggcgcactgttctgtgaaatggcggaatggtgtgatgcgcaaatcagtaaggccgtgctggggcagaccatgaccacggataacggcagttcgcgctcacaggcggacgtgcacaatcaggtgcgcatggacattgtgcgctgggacgcgcggcagctggctaacacgctgaatgaatttctggtgcggccctacatcgaggccaactacgggccacaggcgcactacccccgtgttgttctgcgtatcagtgaagccgaagatctgaaggcgctgacagatgctctggtgccgctgattgaccgggggatgcgggttcaggaatcggagctgcgggaccggttcggcctggctgaaccggacgacggggctgatgttctgcatccggtttctgccggaatgtcaggtgatatggcgatgaaccgcgagcgcgtcgccctgaaccgtgaacactccgacgaactggcgctgatggtggatgatgccctgcgtgactggcagaaaaccggcgaggtgttcacgaacccggtgctgacactggcgcaggaatgcgacagttttgatgactttctgaaacgcctgcctgagcttcaggaaacgctgaacgcggacgactttgccctgcaactggcggaggtgtgctttaaggcccgtgcgctgggggacactgctcatgcgtgaaaccttcatcccgaaagaggcgctggcgtggctgaaggcgaagaagctgcgccccggttttgattaccgggatgtatggcgggaagaacaccggaacagcttcaccgtggcaaaaatgctgcaactggatttgttgtcggatgtgaaagcccttgtggaagacgccctgcaaagcgggcagacgttcagcgagttccgggagatgctgcaaccgttgctgataaaacgcggatggtggggcgtacaggagatggatgatccgctgacgggtgaaacccgcaccgtgcaactgggcagcgaccgccgcctccgcacgatttttgacaccaacatgcgcaccgcccgcgcggcgggccagtgggaacgcattcagcggacaaagcgggccatgccgtatctgatttatgagctggggccatcccgtgagcaccgggcggagcatgtgaaatgggcgcgtctgtgtctgccggtagatcatccgttctggcagacacattttgcccctaacggctggggctgcaaatgcaccatccgtcaggtcagccgtggtgagtatgcgcaactggcggcacagggcaccattcacaccgaagcgccggaaatcagaactgtccgctgggtgaacaaacgtacgggcgaagaggaagaggtgccggaagggattgatccgggctggaactacaatcccggcataaaccgtgagcaggagctggcgcgccagctggcgaccaaacaggcccgttttgacagtgagtagccctcccgccgtaaatccccctgaaacgcatcagaaacgcgttttttattctgatggcgtgaatgtgcattctgacgtttttgaagatgctgtggcgtttttgaagggggttttgaagggggtgtttccccgttttcagtgaagccggtaaatccggctttttttctgccttccgcatactgaccgtcggtaaccccaaacgacggagactgacatgcaaccggaactgctggcgctgtgtttttccctgccagaacccatccctgagctgacacctgctcaactgccggaatggcttgaactcgtccctgcgggtgagttcaccgggcgcgatggccggacgtggattaaccgcaatccgcatgaggtggtcacccgctcgtccgacatcaaaattccggtggacattgaacacgccaccgaaattaaagggcaacgcggtgatgaagccccggcgtatggctgggtggaagaactgcgcgtgacggacagcggcaccattgaaggccgtgttgtctggagcgagtacgcccggtggatgctgagcgaacgccgctaccgctattacagcccggcgtttttctttgacgcagacggtgtggtgacgcgcctgtccagcgtcgggctgaccaacaaacctaacctggactttcctgcactgaatacggagaaaaacccgatgacagtacctgtgcaaatcaccggcctgcttgggctggctgaatctgccacggtggacgataccgtggccgccattaaacaacttcaggagaacgaacaggtggcgctgaaccgcgcacagacacctgacctgacgaagtttgtgccggtggaaacccacaatctggcactgaaccgtgccgaaaccgcagaacaacgccttcagcaactggaagagaaggaagcagaagcgcttgtggatgcggccatcgaagccggaaaagtggccccggcaaaccgtgacatgttccttgccacctgccgcacggaagaaggccgcaaacaatttgcggaatacaccaaaggtgcacagccgctggtgaacaacgacaagcccagccagggcaaggataaacccgcgcagacactgaccgacgccgaactggcgatgtgccacagcatgggtattaccggggaagagttcctcgccgctaaacctaaacaggagaataactgatgggagcagtcacttccgaagtccttcacgcgctgaccacctgtctgagcgccgcttatacccgtggtctgagtggtgtcaccccacaatggcagcgcatcgcctctgaaatcccgagttcgtccgcttccaatacctacggctggatgaaagatttaccggagattaaggaatgggtcagcgcccgtcagatggcaacgctggacggttatggttacacccttgcgaacaaaacctgggaaagttcgatccgcgttaaacgcgaacacattgaagacgatcagattggtcagtacagcattatcgctgaacgctatggccgccagacgtcggagttcccggacaagctgtgttaccccctgctgtgtgccgggtttaacaccctgtgttttgacggtcagaacttctttgatgaagaccacccgctgggcgacggcacctgcagcaacgttgtcggcaccccggcatcagaccagggagaaccgtggttcctgattgatgattctcaggtactgaaacccatcatctggcagacgcgacgcgcctttaagtttgaagccctggatgatctgaacagcgagcacaccttcaagaataacgagttcctttacggggtggacggtcgctgcaatgcgggcttcggcttctggcagaccgccgtcggttcccgtgcggcactgacagcggagaactacgagaaggccagcaatctgctgctgggtatgaaggccaccaacggtgaaccgctgggcatccgcccgaccacccttgtggtggggccgaaaaaccgtgcagccgcgaagcgcatcattgacgccatgctggttaacggcggcgattccaacatctggtacaaggatgtggacatcgtggtcagcccgttcatcaccaccccggcataacccgtcatccgtaatctgttgtaacccgcaatgactggctgattagctgtatcggcaccaacctgtcaccgcacccggcgtggatgtgggccgcgtcatacggcgcaacggcagcgtatcaccttgccattgacccggcgcgtccgcttcagacgctggtcctgaccggcattctgccgcctgcgcgtaatgttcgctgggatatgccggaacgtaacctgctgctgcatgacggcattgccacgcacatggtggacgccggggataacgtctgcatagagcgtgaaatcaccatgtaccgggttaatcagtacggtgatgcggatgtgtcgtaccttgatgtgcagtcacccgccacgctgggccgtatccgttacatcatcaagaaccgtttcacgaaccgttatccgcgccacaagctggcagatgatgacgtgctggactcactggatgccggtcagccggtgatgacgccgaagctgtgcaccgcagagctgctggatatctgccagaccgaacttattcctgcgggccttgtggagaacttcagcgattacaaggacacgcttcaggtgacacgcgacagcagcgataaaaaccgtctgaactttatctgtcacccgaatctggtgaaccagctgcgtgtgctggcaggcctgattcagttcaagctttaagggggccgcatggcaaaaattcttggcatggcgaccattcgcgtgaatggccgcgaaattaaaaccgaggggaaatccacgctgaatccgggcggcttcagtcgcacccagcatatgggcggcggcaaggtctggggtatctccagcaagatggcctcgccgtccatcaaggtgaccattgcggcggcagcggatatggacgtgattgaaatcagcagctgggaagacgtcacggtgatgttctacggcgacaacggcctgaactacatgatgacgggtccgccacggataacccggcggagctggacgaggattccggcaccatcagtgcgaactttatcggtgaaaaatgcgtgaaggtgtgacatggctgaaatggaatttgaactgaaacacgggcttctgaccggcaaaggcacggcagatgaaaccctgcataaaaccgtgaagctgcgcgaactgaccgccagtgatgtgattgatgcacaactggccgcagaacgcgtcgtcatgggcgggaacggaaaggcggtggcctactgctctgaagtgctgatggggctggagatgatgcgccgtcaggttgcggccatcggcagcattcccggcccgctggacatgaaacagctgcgaatgctccacccggcagaccttgagcttatcagcacgaaagccgctgcgctggatgacatgcttgaggaggtggcaacgcgggggcgaactgatgccgctggcggcggcactgatgaacctgctggttaacctgtcccagcgattcagcattcagtacctggaacagctgcccctgcggcagctgttccgcctgataaagcaactggagaaacagcatggcaacaggtaaccgtctcagcacggaaatcatgatcaaccttgccgggaacctgaccgccaaagcccggcaatacggcgcaaatatgtcgcagttcgcccggaatcatcagaaggccatgcgccttgtcaaagccacaacggaggccgcaggacgcggccttgatacgctgggtaaccgctacacggcgatgattgccgggttcggtggtggtatgacccttaaaggcctgacagattttgatgcacaaatccgccgtgcgggtacaaatgcaaaactgaccgatgagcaggtatcccgtttaagaaaaaacatccgggaaacagccagaatgtcagacattcgcctcagtgcgcaggttttactggaaggccaggatgcactgtatggcctgacaggtaagccggaatttgttgaaaaaaatatccgcaatcaggggctggccacgcaggcattcgggactgcgccacaggatgtcgcggcactgatggcacagatgtccgaaaaacagattgaagatcctcaggaagttgaagacatgttcgaccgcttctaccaccagttttccattggttcggttggtgtggatcaactggcgcgcgtatcagcaaaactgttttcgatttataccggtggtggcaaagaggcgatggcccagttgggggcacttgagcagatgctggcgaaaacaaccggttctgcagatgaagcggtaaccgcgctgaacagtatctggagtgaagtcacccgaaaagacaacatcaagtttctgaaaagaaacggtgttgatgtgcttgatccagtcacagggaaaccccgtctgccctatgacgtgatcagagacgttgtcaggcgggcaaaatttaatgagcagaatttgcaggatgttttcggggacacctccatgcggggattaagggcgctgtccagtgaagaagcccttcagttaacagaaaaaatgatttacgccccggttgaatccggtgccatgaaaaaagccgcggagaaaaacgcccagagttttcagtctgcgatgcagtccctgaagaatgaatatgaggtttttgctgaaaaaaatctggcaaaacccgttcaggacctggcggatgcgctcaacagcgtggaccagaacaccgtccagaactggttgcaggtcggtaaatatatggcgattgctgtgggcggcattatcgccatccgaaaaacgtaccagttaggtaaaaccctccacgacatcatgaatcccaaagggaaaggcaaaggaatacccggtggcattacagatgttttcggctccggtgtgatgccggtttatgtggttaatatgggcagtggcgggatgaatggtaataccggcggtctgccggatacaccagattcatcgcgcaatccccgcaatcctcgggggccgggtaaccgtggaggaaaggcaggtaaaggcgctggcatcattgccggtgctctggagttttacgattttctgaccacacaatacgccctgccgggtgaggttgacagtctcactaaatccgttgccggtgatgccagcgccagcccgcgggagcgcgagttcgcgcaacagagtcaggacaaccagaaagcgctcgagtccgtctggcgtaaggtaacggactggtttgactcgctgaacgggaagaacatcggcgggatgccgtcatggggtggaatgcaaccctcgcagcttgcaccgtttctttctcaacaattgcagggggaaatccgcgtggtggtggaaggtgacgcccgcgtgaaaagtgtcagagtggatcaacccggcgtcagactcagtgcgcaggctggcgtcaccagcgtggagcaagggtaatgacaacaggcaatggcaaatgggacgggctgcgcgacgcctcgtttcgcggcgttcccttctttctggtggatacagaaggcaccggtggccgcagggctattccccgtgcttacccccggcgtgaaaccgcctggacggatgataacggggccgttcccggtcaacaacagattaacgcaaagctgccaggtaaaaacttccgggatgatttaaacgcccttttagacgcgctcaataccccaggccccggcgagcttatccacccgtggttcgggatacagaccgtacaggttggcaaggtcactcatcgcctcagcacggaggaagacggcattgcgtatgtcacctttgaagtgtttgaggcaggcgagcgcctgttcccgtctgcggcggataacacgcagcaggaagtgctaacgggcattgatgcggtgaaagccgccattgacgatggcgactggttcggcgcactcgacgggctgggtgagatggccgacagctttctggccgatatggaaaaccttgtggctaacctgcccacgctaccggcagcactgaatcagtggatggacaggctgaaccattttaaggagatggccggaaccatcattgccacgccggggcgtctggtcagtgagttgtcctcgttcatcgacggcgtggttgatctggtgacggaaccacccgaagcactcgcggtttacacgacattacgcaaccagtgggtcggagaacgcgcccgacaggttgccaccggcgcactgccggaagatatcaccgtgaagccaggcagcgtggcagacggcgaaatcggctttgccatcggtctgtcaccgggttatcagccggtatctgacagcctgcaaaagaacattgatgacttccgccaggtggttgtgctggaaaccctgctgggacaggcaaatgccgtggcctcgatgacgttcgataccagtgatgcggcattatctgctggtgacacgctggcggctgaactgcatgagcaggcggtggcggcggtggaaaataaccagcgggcattatggcgaacgctgcgcgatttacggcaggccgtgattacggatgcccgcgagcgtgccgcccgtctgccggaaacccgacaggtgacgctgaccacaaccacatctgccgcattgctggcatggcgcgaacatggtgacacaagccgacgggatgaaatcgtgcagcgtaaccgcctgcgccatccgtcattcatcctgccaacgcaaccagtggagattaccgactgatggaatccgtgattcttaccgttgacggcaaattgtgggaaggctggacggaaatgtccgtcagccgttccctgaaggcgattgccggtgagtttgatctcagtgtgacaacccgctggtcagcggcggcaccgcgcgtgatacgtgaggggcaaccctgcacggtcaggctgggtgcggataccgtgctgacagggtatatcgatgattttatccccagctatgacgcagataacgtggagattcgcgtcatggggcgcgacaaaaaccggcgacctggtggactgctctgtggtgcattcatccgggaaatggaaaggcgtgcggctggaacaggtagcggctgatgtctgccgcccgttcgggatagccgtcatcacggaaaccccgaccggggaggcgtttgcgtccgttgttctggaacagggtgaaacgggctttgaactgctcgaccggctggcaaaacagcgcggcgttctgctgacgtctgacggcgcaggtaacctgattatcacccgcgcctcttccgttcgcgcgggcgtgtcactggtgctggggaaaaatatcctcgccgcccgtgggcgcttcagctggcgggagcgtaacagccagtacatcatcaagggcaccaccagtgccggtggcaaactgtgggacagccagcctgcctcgatggtgggtggtcgccagtacatcaccgaagacccggaaattaaccgttaccgcccgcgcattctggtcaatgaagacagcctgaccgtgggcggggccagcattcgcggggaatggtacaaagcccggatgctgggggaatcccgcacgacggaaatcacggtggcaggctggcgcgaacagggcgacagcggcccgctgtggcagaccaaccgccttgtcgatatcgacgacagcattcagaacctgaaaaccacctggctgatatccggggtgacctggacggatggcgcacaggggcggatgacggttctggcgctggttccgcctgaatcactggatatgccggaaatgaaagcgaagacgaagaaaacaaaggcggtggccacatgggattaaacgcaattgcccgccgtctgcggctgctggttgaccgtgccgttgtgcgcatggtgtctgacagtctggagcggcagaacctgcaaatccagacgctggctgatgccaccgacgacgacgtggaacgcttccagaactacgggtttacttccgttccgccggaaggttctgaagccatcgtgctggccgtgggcggacggcgtgacgggctggttgccatcgcggtggaggacaagcgatgtcgcccgaaaggcctgtcccccggtgatgtccggctgtatcaccaggacggtaaatcgcatatcacgttaaagaaaggcggaattattgaaatcacaggagaacaattaaacgtttcagggaaaacggtaaatctcaccgccgacgaattgctgaatattatcggtaaacaaatgaaattcgtcggtccctgtgaatttactgcagatgccacaatcaacggtaaatctttcatcaaacacattcataaggacggcgacaatgagaagacatcaccgcccatatgacgaccggaatccgctggaataatactctctcacggggtgacatcaccgtcacccataacggcctctcactggatgaggggctggtcactcaggttcttatctgccttttcactgatgcccgtgctgatgacgatgatgtcattccagatggttccggcgacccgcgcggctggccgggcgacacgtacagcgatttttcgtggggttcccgcctgtggctgcttgagcgcgaaaaactgacggaagatgtccgcctgcgcgtggaggattacgcgcgactgtccatgcaaccgctgctgcgggccggttacgcccgtaacgccaccgtcacggccagaatcatcgtccctgaccgtattgcctttcaggtggtgttaacccgcccggacaaaaccacgctcacaatcgaaatcacccgccgatgggaggccaccattaatgccgtatgaaatccccacgctgggcaaactgattgccgacggcgaaaaagatattgcgtatgaactcggcctgcaaaagctgccgcctgtcagtgttgagcaggcgctgaatgtgtcattcagcagtcaggtccgggatttatacgaccatcagagctggatcaaggaccagataattccgtccactacgtctgatgatgaaaccattatcaaaaacagcaacgtatgaaggggttatccgcaagcaggccacctttgccagcgggccggtgaccttcaccagtcagtcccccattccggcagaaacccggatgcagtccgacacgaatcaggtgtatcaggtactcacatccggcgaggtacaggacggcgaggtcactgtcatcgtgcaggctgaagaagccggtgtggcgggcaatcttgctgccggtgccgtgctgaccctgttatccccgctacccggaacgggcagcacaggcgcggtgactgaaagtggcatcaccggtggcgcagacatcgaatccatcgcagagctgctggaccgtctgctgtatgtgcgccgcaatcccccggtgggcggtgcactgcatgattacgtcatctgggcgcgtgaagtgccgggtgtcagccgcgcgtgggcatgggatgcgtggcacggccccggcacggtcgggctggcatggctttatgatgaccgtgaagacattatccccacacgggacgacctgaagacaatggagcagtatctgttctgccacaaacaccctgccaccggcgtgatggtgggcaaaccgggcggcatcgaggtctggccggtgcaggtcaggctgaagaagctcgacctgtccatccgtctgacaccggacagccaggcgaacaggaacgccgtccgggcaaacctgaccgcattgcagaaaacgctggcccccggtcagatgctgccggtgtcctcgctgcgcacggccatcggtatgacgtccggtatcacggattacttcctcaacatcggggaggacaccaccagtgatgtggatgagcttatcaccatcggggaggtgacatggctcacagcgtgacggaatggctgaccgcactgcaacaggtcatgccacggggtaaggcatggccgcgtgataacgacgcggatttaaaccgttttttaagggcgcttgcagagcgtttaacccgcgttgaatacgacgcctcgcgtctgcatgtggagatgcgaccggaaaccacgctccagttgctgccggagtgggagcaatatctggcgctgccggaatgcggaattgccgccaccacaacggaagcccgccgccgggccgtggtggagaaataccgccgcaaaggcgggctggccacctggcagattgaagccgctgcggcggcgctgggattcactattaaggtgacggccgttctgccgcaccactgcctgcgtgactgcatgtacccgctacatccggcgcggtatcgctggctgctgaaagtggaagtcccggacaaagatgccgggcggtttacctgtattgatgacgtcatgacgccattaatcagcgaacggacccgcgagctggaatgcctgctgaagcattaccggctggcgggcacggaatatgaatattattacaccggagaataatttatgtttcatgtggataatccgacgggtgtgccagtgatgccacctgtcgcggctgaattaagcaaaacaacgctttattttaccgaaggcgggaacggtattccgcccacttatccggggccggactggtttaatattattcagtctgaactgctggaaattctccggcaggcaaatatcaaaccggataaaaacacaaccgaccagattatgacagcgctgaaaaaaactgtttattacgaacagtggttcagccggagctattgccggattaaccggtcagaataatacgttcccgtattttacggcgaagacacaatggcattaacgccgctcagtgcttttgtgcgcggtattctcgggaaaaacacagccggtgaaattatcgacgcgcttttattacgtgacacggtaaataaagctaatagtgctgtaccgaatacccgcagggtcaacggcatggctctgtcttcggatatcaccatcagcaacatcagcggcaacgccggaacggcaacccgacttcagacggcccgcaggattaacaatgtgctgtttgatggcagccgcgatatcacgatttctgcgggaatgtcacaaactgaaggtgacaaccgttaccagcaaaaaaacacggcgtcaaaagccggtaatggctggtttaaggacacgtccaccggggtgattattcagtgggggtatctcggcaatgccagtgccgggctgacgtttccgatatcatttccgtcagcatgtaccagcatcactattaccaacgcatacacccgtgctgattactctatttccctgaaatcgttatcagcagcaggtgcgacattcaacagcgagaataacggcgttatgtactggacagcgatagggtattaatgatgactatttatttcagcccatcaacaaacggtttttatcattctggccttcagggtgattatgaaaatgcgggaacgtggccgaatgatttacaggaaatcacggatgaagaatatcagagactgttacagggccagactgacggttttattattgtatctggcgaaaacggatatccggtattaaaagaacccgtaattaactggcagcagaaagcggaaacgcaacgccagcacctgctggctgaagcaagggaaatcacctccgactggaaaaccgagctggagctgggcaccatcagcgacgatgataaagcccgtcttacgcagtggatggcatatatcaaagcggtaaaggcactggatttaagcaccgttactgacgaagactccttttattccatcaactggccggagcgtcccgatgccgcagcttaaaggtgtgattaaaacgcccacgggagaaccgctgggcggcgcaaccattacattgacctccctgcacaaccgcgcagggattctgaaaagtgttttcagccatgtcaccacacagaacggggaatatgacttccccgttctgccgggtgtgtacagcgttcgcctgacacaaagcacacagcgcctttcagaaatcggtgtcatccgcgtttatgaagattcagcggacggttcgttgaatgattttctgggtgcaaccgatattgacctgcgcccggaagccctgaagaaattcgaagagctggcgcaacaggcgcagcaaagcgcagaagccgcagcggaaagcgagcgacaggccgggcaacatgtcgctgatgcgcagaagataaagaaagactgtcagacgctggcggataacgtacagcagaacgcagaagccgtagcggccagcaaacagcacgttgaacagctggcctcagaagttgagctgaacgccgggcaggtgcagcagggcgtgcagaatgttactgatgcggtaaaaaaggcgcagcaggcagcaaaggattctgctgacagtgccacagattcgaaaaacagtgctgacaatgcggcactgagcgaacagaacgcacaaaaacacgcgcagaaagctgaacaacacgagcagcagactaaacaatatgcgcaggatgcagcgaccgccgcagaatcagcagagaacgccaaaggcgaaattgacgaaattctggaaggtggctatctcaagataaaaaacaactttcaggaaattgttgatgctggcccgtcagcactggctcaggcccaatggaatttacagatttccggggtgaaaaataaacaggtaattgccaccccttatacatggccatccagaactgagtatgaacaaagggtgcatctgccactcgccggggcttacggatttggctacacatttgaagaccaaagccaggggcgaataaattttaatgagggctatacggcgtcgtggtggtcacagtgggcgaaacctggtcgttattacgtcagcgccagtgataaagaatacctcgcacctgaaggagaaaggtgggggattgttgatttgctgtggcttaatggcagcggatataacgatgcttcgaaggttctgaagatactggctttttacgactcagacgggcacttacacataggcaagcgcgttggtcagagcgactggtcaataagctggcgcaagctggcatcgctctctgatgtcagggccatgctgtattcatatatttataataattacaacagagaatggcgagacccggaactgggaggtttaattctggcgtcataccagggaaccgcagacggcgacacaaatataaaagtatcccgtggtcagacttatcccggctcgcgactcgctcctgtggcgatagaatgccagttcaccccatccggcacgtatgctgcaacaccgcgattctacattaccggctgcaagagcaaatcactccccggaacttatatttcattgtctggcgcgccaacaacatacagcgaccaggcatttgttgcgctattcatgaggattgtatgatgcagattaaagaaatcaccagcccccgttataccgaatccggtgcgattgactgcgacgttctgtttgaggaaatggaagcccctgttccctacactgccacgccggacgatacagcgaaaaccggtcagcaaatctggcaggaactgcaaagcggaaaatggggtgaaataaccccgtttgccgtcacgccggaacttatcgcagcggcgaaggatgccaaaaaacgggagattgaggcatggcgcacagaacaggaggcgcagccattcacgttcgaatggaacggtcgtacctggaatgctggtcccgattcgatggctcgcattgcgcccgtggcaatggccgcaaaagtggcaggtgcacgggcaacgctggggtggggggatgcagcaaacagccttgtcaccatgacaatggcgcagcttcaggagctggcagcaacaatggcgcaggcgcaaaccgagcgcaatactgtgatttatcgtcgtcagcgtgagatgaaagagcagctttccctgttgaccacactgaacgaaataagagcattcacacccggcgattaaataatcattttgtatagtttatgacgatcgataacatcatatcgatcgtcggtttgcatcatatgtgattaaatacccccagccctccgggcggtcatgtctggttattacacagggggaatcatggactctgttcgctgtaaaaactgcaataaattactgtttaaaggaggttttaagcatatagaaattaaatgccctcgctgtaaacgttacattgtcatatcgaatgccaaagagcatcccacggagctgtattgtgggaaaagagaagaaatcacgcattctgacaaaaccctgcgttattgagtatgaaggtcgtattgtcggctatggttcaaaggagctacgtgttgaaaccatatcctgctggctggcccgcacaatcattcagacaaaacactattcccgccgttttgtgaataactcctacctgcatcttggcgtattcagcggacgtgatctggttggcgttcttcagtggggatatgcccttaaccccaactcagggcgtcgggtcgtgcttgaaacggataaccggggctatatggaactgaaccgcatgtggctacacgacgacatgccccgcaactctgaatcacgggctatcagctacgcgctgaaagttatcaggttactgtatccgtcagttgagtgggttcagtcttttgcagacgaacgctgcggacgtgctggcgtggtatatcaggcgtcgaattttgattttattggtagccatgaaagcacgttctacgagctggacggcgagtggtatcacgagatagcgatgaacgcgattaagcgcggagggcaacgaggcgagtatttgcgggctaataaggagcgggccgtggtacacaaatttaatcagtatcgctacatcaggttcctgaacaagcgcgcaaaaaagcgcctaaacaccaagctattcaggattcagccatacccgaagtgatcttacttaatgaataaaaaagcagcggccaatgccgctgtttcgtttgaagcgcgaaaattaaagttttcgcatttatcgtgaaacattttcgcgtttttcgtgcgccgcttcagggaattaaagggataaataacggcgaaatagagtgatcaaataacgtctgtttattagccagccagcggcgttgggttcgtgattagcgaagaaaaatcatcataaattggtgaaaaatataacaggtagttaaaaaccattagtgctgagtaaattgccggatgacatcagaacgatgccatccgaacagtggcttaaccctgacggttgaaacgttgcgttttaacgtccagcgttagcgtttcttctggttgtatcgcatacagtttctcaccctgctggcaaatccagccaatccccagttcacgggcgattagggcgctgtgggataccggacttccggcgctaaggcagataccttttacaaccgccggatccagttgcagtactgtggaaggataaatgttctccgccagtagaatagttggcgagttaaactgcgggagttcttctttcgtttgggtcaggtggaccagggtgcgatgcagaagatcgtccacatcaatatagcgagcttgtagatattcatcatccagttgctggtattgctggctaagttctttaagaacttgctgccaggcatattctgccgtgcaatgttcatgctgaaggagttcgcttgccgccgccagcagttccggatcatctaacagtgtatggtgaccagaaaagattgcggcaatatcgtcaagcccgctggcttctgctttcgctgttaacgtcatcagatctaataacgtgaagtcaatagcctggcgtaatcgatcttgttcttcttccacggtcagggttgattttgcctgtaccgtacataaaactggttgataataaaaggctttacccgaaacaggcggaacgggacgcagagtaggtggagcgacttcctccgtttcaccaaagttatcttcagccagctgacggaaagcgatcagtgcctcttcagcttctggccctttcgcaatcaggcgcagcgtatcgttatagcgaacttgtagtaacgcaatctggttaatactctctggtgtgacgcatttgccgtttttttccagcaacatatcggcattaaatgtcgataaggtataaaccagccgggaggccggacgtacatgcaggccgttacggttttttatgaccaccgccagagaacgggcttcttcatcgtacgcaggacatgtgtcagagatttcagtgtcggaggacggtaaacccagttgttcacgtttggcttccagcgcatgcatggcgtcaaagataactttgtcgatatccgcccccgaggccgcgctgaccgttgctgccagtgtaccttcgaccaacggcgcagcacacaaacgtacttttgcggcgatctcgggagccagcaattccagcgcagtttcagcactcaataatgcgctacccatatccatcatgaccagcacatggtcggcatcagcaacagattcgatggcctccatcactttgacggcatcggtaccaatgggattttgtggatcgtcaattcccgcggcaatggcgattttacaactatcactcattaacatctgacgggctaattcaccgacaccttctcccagtcggctgctatgtgaaactatgaccaggtttaccatcaccaattccttactcttttgcggctaacgccaacatttgcatcataaacatcaccgaggtcgcgccgggatcctggtgaccaatactgcgttcaccgagataactggcgcggcctttgcgggcttgcatcgtaatcgtactttgtgcagcggattcggcgatgctactggcagcttcgagcgccaccggaacagagagattttgctcgctggactgacgtaacgattccaccaccggcacccacacatcacacatggttttatcgccaggttcggctttcccgcgactgattacgccgtccgcgccatcgcggaacatctgataaagctcttccagtgtcaggctttgccgtgcctgggtcgcctgtgcggcgcggataaagaaggtaccgaacagcggaccactggcaccaccgacgctggaaagcagcgtcataccggtattcttgagaatgaaaccgatatctttatctgcgatagcagggagtttttccaccactttgctaaagcctcggttcatatttagcccgtggtcagcatcgccaatttcgcgatccagtccggtaagatactcgctctcggtgctgaaaatatcgccacaacgagtgagccagttaacaatttgagttctgctcagtgacattgctttctccttatttaccccagttaagggccggggtgtggaccggggcgtcccagagtgccagcgtttcgtcatcaactttcagtaaggtgattgagaaaccggtcatatccagtgaggtgcagtacgcgccaattaaattacgttcgatagtcaatcccgcttgctggcaacgtgtggtcaggcggttatagacgccgtacagctcagaaagcggagttgcgccaagattgttaaccagcgcaatcacccgatcgccagactggagcggttgtttggtttgttgttcttcctgccaactgccttgttgataatcccagaaacgcaaagtgcgatggtatgagccatttaccagcagggtgtcgaacatttcatcgacggtttgatcaagggaagagaaggggcggcggtcaatacccggctcaccatgaatgccgacgccaaactccatctcattatccgccagggtaaaagaaggtttgcccgcggcaggaacggtacaggcaccgagagcgatacctattgagtggccttgattattcagcttacgccccagttccgcacaggcgtccagtgagtcgccacgctccgccgctgcgcctacgagtttttcaattaatacggtgttggcaacgccgcgtcgcccggcagtataaagactgtcttttaccgcaacgtcgtcatcaatgaccacagtggtcacttttacgccgctatcgtgcagtaactcggtcgctgtttcaaagttaagaatatcgccggtgtaatttttgataatcaacagtacaccttcgccgccatcaacttgcatggcgcattcaaagattttatcgggcgtcggtgaggtgaaaatttcgcccggacaggcccccgaaagcatcccctgaccgatataaccacagtgcatcggctcgtgtccgctgccgccacccgacagcagggcgacttttcctgcaacaggggcatcagctcgggtgacatacaccggatcctgatgcagtgtcagcgatggatgcgctttcgccagtcctgccagttgttcgtccagtacgtcttgcacatcattgatcaattttttcattattttgctccagcaattacggtagggcatggatgatgttcaacgacacggcgaccactgactgccgatgaatccattgtgcatcaggcaagggaaaagaaaattagcccaaattatgtttcatagtgaaacatatgctttaatgaatgttccatattgaaacttttacgtgtattaatacttaaaattgcgagccggaacaccttttgtcataagggatgcgggatatgagtggcgcttttaacaacgatggtcggggcatatctcccttaattgcaacctcctgggagcgatgcaataagctgatgaaacgggagacatggaacgtaccacatcaggcccagggcgtgacatttgcttctatttatcagcgtaagaaagcgatgctgacgctcgggcaggctgcgctggaagatgcctgggaatatatggcaccgcgagagtgtgcgctgtttatcctcgatgaaaccgcctgcattctcagccgtaatggcgatccgcaaaccttgcagcagctaagtgcactgggattcaatgacggcacgtattgcgccgagggaattattggtacttgtgcgctatcgttagcggctatctctggtcaggccgtgaaaacgatggccgatcaacatttcaaacaggtactctggaactgggccttttgtgcaacgccgttgtttgacagcaagggccgattgacgggaacaatagcgctggcgtgtccggttgagcaaactaccgcagctgatttgccgttgacgttggcaatcgcccgcgaggtcggaaatttactgctgacggacagtttgctcgctgaaactaaccgtcatttaaatcaacttaatgccctgttagaaagtatggatgatggcgtgattagctgggacgagcagggtaatttgcaatttattaatgcccaggcggcgcgggtcttgcgccttgacgcgacggcaagtcagggacgggcaatcactgaactcttaacgttacccgccgtattgcaacaagcaataaaacaggcacatccgctcaaacacgtagaagcaacctttgaaagccagcaccagtttattgatgcggtgataacccttaaaccgataatagaaacgcagggaaccagctttattttgttgctccatcctgtggaacagatgcggcagttgatgaccagtcaattaggaaaagtcagccataccttcgctcatatgccacaggacgatccgcaaacccgccgcttgattcattttggtcgccaggcggcgcgcagtagctttcctgtcctgctttgtggagaagagggcgtgggcaaggcactgctaagtcaggcaattcataatgaaagcgagcgtgctgcaggtccttatatcgccgtcaattgtgagttatatggtgatgctgcgctggcggaagaatttattggtggcgatcgcacggacaatgaaaatggccgtctgagtcggctggaactggcacacggcggcacgctgtttcttgaaaagattgaatatctggcggtggagttacagtctgctttgcttcaggttatcaagcagggggttatcacgcgactggatgcgcggcgtttaataccaattgatgtcaaagtgattgcaacaacgaccgcggacctcgcaatgctggtggaacaaaatcgttttagtcgccagctgtattacgcgctgcatgcatttgaaattaccatcccgcctctgcgtatgcggcgtggcagcattccggcgctggtgaataacaaattacgcagtcttgaaaaacgcttctctacgcggctgaaaattgatgacgatgccctcgctcgcctggtttcttgtgcatggccaggcaacgattttgaactttacagcgtcatcgagaatcttgctctgagtagtgataacgggcgcattcgcgtcagtgatttgccggaacatctgtttaccgagcaggcgacagatgatgtcagcgccacccgcctttccaccagtctgtcatttgcggaagttgaaaaagaggcaattattaacgcagcccaggtcacaggcggtcgcattcaggaaatgtcggctttacttgggatcggccgcactacgctgtggcggaaaatgaagcaacatggcattgatgcagggcagtttaagcgccgggtatgaaagacagaaacgatttctgatacatcagagtgatctgtatttcattccggcgcacgctaacaattttcagcatcgtttaagggcttgtctatcccgcacttaaaagctgaagcgatatcctccgttgacttgcttctgatcaaagaggttaccctgcgtgtaatccgcttcgagatagaatgtgtgctgtttgttatactgtgcactgactcccacgccgttattccagccattacctttgaaactgtacttctcccgggagttgttcaacagatattcggtatcccctgaaaactcgcggatagcgccagtcttcacatagacattcagctggctgttgcctgcggtgatgtcataccccagtatcatgctggcacgccccagcagcgattcgtagtgattcagatgtatattgaggccattactcgccttcatagtcatctcattctggtggctgtatgtaagctgggtttgcggctctatatagaacccataaccagtaggggacaggttgaacctctgcccggcttccagggagatgctcattccattcgcagtgccgttggcgttaacgccgttgttctgactgtccagtacgtggaaactatttttctggcgcgatgcttttataacgagatcgctgtaaaaaccgttttgtgccatgtaactggcgtacattcccatgtagtctgaacgtgcggtaccgtcgcctccgctatagtccggcgatgcatgtgttgagccaatatacagaccgacatacaacggcattacatcagagagacgtttatccccaccaaactggataccgctgtaacccatgtcaaagccgctcagtttgccactggcaaaggagtccaggcttcccccataactgcgcaaccagatattaccgtctttactctgatttcgcaggtcacccatccgttgcatcagcgtacggttttcaacatagttcaataagtaaccgacattgagataattgccgccagcatctgcggtcgtggtgggtttaggcgtgggagcgggttcaggcgtaggatcggggttgactatgggaggctgagcgggagctggtgtgggttcaggattaggagtcggttccggaactgtcccggaagcgtaaagctcccagttagtgccatttttacgcacatcgtacagatatccccccaactcaacctgagaagacgcgctgaacgaggccgcgccgtcagtggtttttaccactgtcagaacttcatttcccgttgtggcctcgctgccctggttgcggatagccaatacgtgattaccagcactactcccgctgatattcaataaatcccctttattattaacgccattaccctcgccaacaacatcagcacgcataataaaggtactgttaccgctcaggttctctacgtttaatgtggcaaatgtgccggcagttgacccgtggctggcaaaatcgacagttgaatggctcagcgccagcgtgtcgagattagaattacttgttacgttccagacgctgttattcattgcaacgtccagttttccgccattgacattatcgctgagggaggaacctgtccaaaccgacccagggtgcatatccagattgattagcccacctttggaaagaacgctaccgttgataagcatacgacccgaggcgttgatgcggctggcggcataaccatcgtcatgttgcgttgcgatggccatctggtcgggtgtactcatatcaatgaccagatcgctcgtgaggtcgatctggctgttggtcatggcataaattcccctggctcctgccgcgccggtgatagccaaactgtctccggttattctaccgccgctgagagcccacaaacccagcgccagactgccattacgatcaactgtaatatcggtattttgcatgttgacaacagccgttgccgtctgggccgaggcaccataagaaccgccggaaaagatgctgtttcgttgcgctgccgtgccagtaaaattgattatcgcgtctgaaccactggtgacgaggccaccgccctgcgcggaagaaatatggctatctgcaccgatagtggttgtaccaccacgaacttcgacgccattggccgcggctccagttacatcaacagtgagtgcattcgcgctaacctggccaaagctccagaggccgtgagcattatcgccattggttttaatggtactgtttgttccgagatcgacaacagagtttttctgtacgtttatccccatggcgctgtagccctgaacatcgattgtcaggtctgtagccgtaaaacgcgcagcaccattggcgttattgccgttgagaccaccgatataaacacctgtacttccatcggtcgtgattttacttccgcttccaagatcgacactggtgccatagtcattgatggttaggcctataccgttcgagttttcaatggtgaattgagtggctgttagtgttgagctatgcccaataatgatgccgtcatcgttactcttaatggtgctgcctgtgcctaagtcagcatgggtatagtcaccaattaagttaatgctgatggcagaggtttgaccaacaacatctactgtgagtcggttagctgtcagggagctgtttttgccctgaataatgattccttttgcatatccagaggcgtcgttgacattgacggtgacatcattacccaggttgatattgccaggcgtgtttcctgctggggtcattacaccatagaggtttcctgatggatcggcggtatctcctgtaattctgtcaccatcattaatagtaatattggtgccatattgacttcctgtatcagcagctatcagcaggggggaaaagataattgcattcaaaccaatagcgccaaattttatcagttgaattgagggcgaacggatttttaattcagcgagacgatctgctttggtattcccattgtgttgtttgatgcccataccactcctatatagtacccagactatgggtctatggattttgtcattttgtttaaatcaatgaataatatcctcttatcatcatgatatttgtatggtgcaatcatgatgagcttctcagagaataattctctattaccgggcaaaatcaggaacacaggaattaatatatatttaacatcccccttacaaaggtgagtttatatcgagttattccctaagttgtcgttacttattccaattcgttactataaatatggcaaaaatattacaacaaacagcggttaaaaaatttggtgaagattttttgtaataatcctaattagttatgggaatttcgcttgatgtatctgcataacaaaaacaatatgcgccatttttgcattactaataagaaaaagcaaaaaacatcgatattcatttttggtcaatgggttttctggcctatcgttgttattgtgctactggttatcattttcatcttgccagcatattggagcgtgatcaattttgatcagctgtgaagggggctgatgtgtagtgatacaaaaacttacgttatatcactgctaatgagatatccgtcatctgaacacttatgtctttaattattctcgtggttcactataggcaataagcacaaaagtgtaggatgttacaagaatgattaggactcggtgaaatgaaaaatccacgcaattgcgtggattttatatacttttgcgctcttcatgagatttagcgaaacctcatgagacaataaattaattagacgttgaaaaggaagttcatcacatcgccatctttcacgatgtaatctttaccttctgcacgcattttgcctgcttctttcgcgccttgttcacctttgtaagtgatgaaatcttcaaacgagatggtttgtgcacggataaagcctttttcaaaatcagtatggattttgcccgctgcctgcggcgcggttgctccaaccggaatggtccatgcacgcacttctttcaccccagcggtgaagtaagtttgcaggttcagcagtttataaccggcacggatcacacggttcaggcccggctcttccagcccaagctcctgcataaactcgtcacgttcttcgtcgtccagttcggcaatgtctgcttcaacagcagcacaaaccggaaccacaacagaaccttctttcgccgcgatttcacgcacctggtcaagatatgggttgttttcaaaaccgtcttcgttgacgttggcgatgtacattgttggtttcagcgtcaggaagctcaggtaacgaatagccgctttctcttcagcgcttaaatccagcgcgcgcagcatacctgcattttccaactggggcaggcatttttccaggaccgccagctcagctttcgcgtctttatcgccacctttggctttcttctgtacgcgatgaatcgcacgttcgcaggtgtcgaggtctgccagcgccagttcggtgttgataacttcaatatcgtcagccgggttaactttgccggaaacgtgaatgatgttgtcattttcaaagcagcgaacaacgtgaccgatcgcttcggtttcacggatgttggtcaggaactggttacccagaccttcgcctttcgatgcgccttttaccagaccggcgatatcgacaaattccatggtcgtgggaagcgtacgctgcggttttacgatttcagccagttgatccaggcgaggatcaggcattggtacgacgcctgtgttcggctcaatggtgcagaatggaaagttggccgcttcaataccggctttggtcagcgcgttgaacagggtagatttcccgacgttgggcaaaccgacgataccgcatttgaatcccatgatttaaatcaccttaatatcttaataatcaacctgttattgctaacagattgcagaaatggaaataactttgcctattatacacggcactcggcaaaaatgccgcagacaacgacttattgcgctttaaaggcgtgcaatcggttcgttgctttggtcaagccatctgtaaaccacatttcagtacaacgcgccgcttcgtcaatggcttcatcaattaacttctgttcactaacaggcggtttgcctaacacaaaaccgacaactttatttttatcgcccggatgaccgattccgatgcgtaaacggtgaaagttagggttattacccaatttactgatgatgtctttcagtccattgtgaccaccatggccaccgcccaatttaaatttggcgacgccaggaggcagatccagttcgtcgtgggccaccagaatttcgtccggattaatgcggaaaaaactggccatcgccgcaacggctttgccgctgagattcataaatgtagtcgggactaacaggcggacatcttcgcctccaagagtgactcgcgaagtataaccaaagaatttagcctcttcgcgcagcggagcgcgcaaacgctctgccagtaagtcaacgaaccaggcaccagcattatgtcgcgttgcggcgtattcagcaccggggttcgccaggccgacaatcaatttaatcgtcacgtttttttgtcctgagtgtgtacataactggcgcgtagtttactggttgcggccccgcttgacaaaaaactgcgtatcaaatgcagataacgtaataattgcctgagtggactattagaaagtcaaggtgttcaggcgtttatttgtaaagttttgttgaaataagggttgtaattgtgatcacgcccgcacataacccactgggtgttgtctatactttacacataaggaagaggggtattccctgttacaacccagaaagttccggaggtgacatatgaaacgcaaaaacgcttcgttactcggtaacgtgctcatggggttgggtctggtggtaatggtggtcggcgtggggtattcaatcctcaaccagttaccacagtttaatatgccccagtatttcgcacatggtgcagtgctaagtattttcgtcggtgccattctctggctggcgggtgcccgtgttggcgggcatgaacaggtgtgcgaccgttactggtgggttcgccactatgacaaacgttgccgccgtagcgataatcgccgtcatagctaacaaataatgcagtttgctgaccagtcagtttgcgctgactggtcaatctcgtacttataaatccgccatcgccgcgcgacgattcgggaagaacgccaggcgtcccgggatcggttgaatgccagcgcgagccatagtgcgcagtggctggaattccacgttgcacacgcgcagttcacatccctcgggcagacgcttcacaaaacgctggaacgcatcaagaccaccagcatcaagtaccggaacggcatcccacttcagaatcacaatccgtttgccttcaagacgtgactccaggtccgtgaataagccttcagcagcagcaaaaaacagcgggccaataacgcgcagaaccaggacatcgtctggaacatctacgactaccggtgccaggcgagtcatacgtgcgatacgacgcataaacagcagcgatgccagcacgatccccacgctgatggcaataaccatatcaaacaacacggtcagcgacatgcacagcagcatgacgatgatgtcatctttcggcgcatgacgcagcaagtcgaccactttgtgcgcttcactcatgttccacgccaccatcaacagcagggctgccatggcggaaagcggcagccaggagagcagcggtgccagtaccagcagggcaagaataaccagaatagagtggatcaccgccgagataggggacgttgccccggcacggacgttagcggcagaacgcgcgatggcagctgtagcggtaataccaccaaagaacggagcgataatattccccagtccctgtccaaccagttcgctgttcgccttgtgtttcgtcccggtcataccatccagcaccacggcgcagagcagagattcgattgcgccgagcattgccattgagaatgccgcaggcagcagtgtgcgaatagaatcccaggttagcgtgaattctgaattaggcagatcccacggcagcaccagttgcggcagcagttgcggaataccgttaccctgagaaccatcggccaggacgtagtggaattgcgaaccgatggtagcaacatgtccgccgagcaggttaacaatccccatcaccgcgcaaccagccagcaaggccggaaggtgaccgggtaaacgaatgcccagacgcggccaaaaaacaagaatacctagcgtcacaatgccaatggcagcatcacccacattaatggtcggcagcgccataaataatgcgccgactttttgtagataatgttccgggacatgggccatttgcagaccgagaaaatctttaatctgcatggtaccgatggtgatcccgatacccgaggtgaaacctaaggtgacggaaaccggaatatactcaatcaggcgaccaaagcgtgccagacccatcagaatcaaaaagatccccgacagcaaggtcgcaaccagcagtcctgccagtccaaactgttgcgacacgggatagagaattaccacaaatgccgcagtcggaccggaaacgctaaagcgtgacccacccgtcagagcaatgacaatccccgcaacagctgcggtatataaaccgtactggggtgccacaccactaccaatagccaacgccatcgccagcgggatagcaataatcccgacggttatcccggcaatcaggtcacgggtaaaccgtgcggcagtatatttttctttccagcaagcgtcgatcagagcgcggaaaggcatcacatgtgaggaaaatattttgttcacaataatgtttcatccgtgagcgcatcatctgtcaactaaatggcaggtgaaggaggcataggtcatacaaatggatattacagacaaaaaaacccgccgcagcgggtctttgagccgggttcgattagtgttcgaacatggcagagatcgattcttcgttgctgatacgacgaatcgcttcggccagcatacctgacagggtcagagtacgcacgttcggcagtgatttgatttcatcgctcagcggaatggtatcgcagacaacgacttcatcaattacagagttacgcaggttgttcgccgcgttgccagagaagatcgggtgagtcgcgtacgcaaatacacgtttagcaccacgttctttcagagcttcagctgctttacacagcgtaccgccagtgtcgatcatatcatcgaccagtacgcagtcacgacctgcaacgtcaccgatgatatgcatcacctgtgaaacgttcgcacgcggacgacgtttgtcgatgattgccatatcggtatcgttcagcagcttagcgatagcgcgggcacgcacaacgccgccgatgtccggagaaaccacaattgggttatccagattcagctgcagcatgtcttccagcaggatcgggctaccaaatacgttatcaaccggaacgtcgaagaaaccctgaatctgttcagcgtgcagatccactgtcagcacacggtcaacaccgacgctggagaggaagtctgcaaccactttcgcagtgattggtacacgagcggaacggacgcgacggtcctggcgcgcatagccaaagtaggggataacagcggtgatacgacctgcggaagcacgacgcagggcatcaaccataacgactaattccatcaggttgtcgttagtaggggcacaagtggactggatgatgaaaatatcaccaccgcgtacattttcattaatttgtacgctgacttcgccatcgctaaagcgacctacagcggcgtcgccgagtgaagtgtacaggcggttggcaatacgttgtgctagttccggggtggcgttaccagcaaaaagcttcatatcaggcacgagaagaacctcaggcatgcgtccattggtggaaagaatctgccgaaaactgtgcgggccaggcatgatcctttccaggcggtgtattaaagagcgcgatgcaacgtctggaacaaggtgacgttgtcaccgaaactcagcttgcccggcttaaagcatggctctgtgcaatggggaaagattagcgcctttcgccacaaagccattgagccattccggggcttgctctagcacctggcgggcttcagactctgtatcaaattcagcaaagacacaggcccctgtcccagtcaggcgcgacggggcgtattctaacagccaggaaagcaccgcatcaacctcgcgaaaacgttttcttgcgataacctcgcaatcattgctgaattcacattttagcaacgtttctattgacctttttggcgtattgcgcgggagttcaggatctttaaaaatcaccggagtcggaatacttacaccagggtgcgccaccagataccacttctctggcggatccaccggcgttagtatttcaccaacgccttcggcaaacgcggcatgcccccgaacaaagacaggaacatctgcgcccagcgtcagccccatttccgccagctcatccatgcttagcccgcattgccagagatgatttaatgccaccaggaccgtcgcggcattggatgaaccaccgccgagaccgccgcccatcggcaaacgcttgtcaatgctgatattcgcaccgcttcccgtcggaagacgcccgctgtctgccgcagttttcatcaacaatcgcgctgcgcgaacgatcaggttatcttcatgttccacgccttcaacgggcgttaacagacgaatatccccatcgtcacgaagctcaatgctgatggtgtcgccgtaatcaagaaactgaaacagcgtttgcagcgtgtggtaaccatccgcacgctgaccggtaatgtataaaaacagattaagttttgccggagagggccactgtgtccgcattatttcactatccagttatccatttttaacttgatgcgttgaccaccgtcggtgagttccatattggctggcatcgcaggttgcgttttggtgtcataaccaccataaacaaccttccagtttttgccattctggctgtaggtaatttcgctcaggcggtactggtcgtccagtttgtagtcggttgcatcacccggtaaacctaaaatccactggcgcaagctgttgagcggaattggcattccggtcaatttgccaatcatctcttcggcgtcatcggcggtataacgctgacctttattgtcgactaactgtacgttacccggttgagcattcagctccagttccgtgctgcccaatgggttagtgagcagcagacggtagcgatcctggccggtttgctgccagaaaaagcgggcgtacactttttgttggtcagaaatataagcgaacgcgccgcgagtctgatactgattaagattgcgcacgtcttgctgatgctgacgccattgtggcgaatccgggcttttgccaggacctttgggcgtggtaacggaacaggcagtgagcacaagagcagccagcggtagcaggcggataagacgaaaatcgggcaggggcatagtgatgacaagtccttgagatacgttgcagttataacccttaatgctagcgttaccgtccgctatcgtctatgttcaagttgtcttaattgccagaatctaacggctttcggcaattactccaaaagggggcgctctcttttattgatcttacgcatcctgtatgatgcaagcagactaaccctatcaacgttggtattatttcccgcagacatgacccttttagcactcggtatcaaccataaaacggcacctgtatcgctgcgagaacgtgtatcgttttcgccggataagctcgatcaggcgcttgacagcctgcttgcgcagccgatggtgcagggcggcgtggtgctgtcgacgtgcaaccgcacggaactttatcttagcgttgaagagcaggacaacctgcaagaggcgttaatccgctggctttgcgattatcacaatcttaatgaagaagatctgcgtaaaagcctctactggcatcaggataacgacgcggttagccatttaatgcgtgttgccagcggcctggattcactggttctgggggagccgcagatcctcggtcaggttaaaaaagcgtttgccgattcgcaaaaaggtcatatgaaggccagcgaactggaacgcatgttccagaaatctttctctgtcgcgaaacgcgttcgcactgaaacagatatcggtgccagcgctgtgtctgtcgcttttgcggcttgtacgctggcgcggcagatctttgaatcgctctctacggtcacagtgttgctggtaggcgcgggcgaaactatcgagctggtggcgcgtcatctgcgcgaacacaaagtacagaagatgattatcgccaaccgcactcgcgaacgtgcccaaattctggcagatgaagtcggcgcggaagtgattgccctgagtgatatcgacgaacgtctgcgcgaagccgatatcatcatcagttccaccgccagcccgttaccgattatcgggaaaggcatggtggagcgcgcattaaaaagccgtcgcaaccaaccaatgctgttggtggatattgccgttccgcgcgatgttgagccggaagttggcaaactggcgaatgcttatctttatagcgttgatgatctgcaaagcatcatttcgcacaacctggcgcagcgtaaagccgcagcggttgaggcggaaactattgtcgctcaggaaaccagcgaatttatggcgtggctgcgagcacaaagcgccagcgaaaccattcgcgagtatcgcagccaggcagagcaagttcgcgatgagttaaccgccaaagcgttagcggcccttgagcagggcggcgacgcgcaagccattatgcaggatctggcatggaaactgactaaccgcttgatccatgcgccaacgaaatcacttcaacaggccgcccgtgacggggataacgaacgcctgaatattctgcgcgacagcctcgggctggagtagcagtacatcattttctttttttacagggtgcatttacgcctatgaagccttctatcgttgccaaactggaagccctgcatgaacgccatgaagaagttcaggcgttgctgggtgacgcgcaaactatcgccgaccaggaacgttttcgcgcattatcacgcgaatatgcgcagttaagtgatgtttcgcgctgttttaccgactggcaacaggttcaggaagatatcgaaaccgcacagatgatgctcgatgatcctgaaatgcgtgagatggcgcaggatgaactgcgcgaagctaaagaaaaaagcgagcaactggaacagcaattacaggttctgttactgccaaaagatcctgatgacgaacgtaacgccttcctcgaagtccgagccggaaccggcggcgacgaagcggcgctgttcgcgggcgatctgttccgtatgtacagccgttatgccgaagcccgccgctggcgggtagaaatcatgagcgccagcgagggtgaacatggtggttataaagagatcatcgccaaaattagcggtgatggtgtgtatggtcgtctgaaatttgaatccggcggtcatcgcgtgcaacgtgttcctgctacggaatcgcagggtcgtattcatacttctgcttgtaccgttgcggtaatgccagaactgcctgacgcagaactgccggacatcaacccagcagatttacgcattgatactttccgctcgtcaggggcgggtggtcagcacgttaacaccaccgattcggcaattcgtattactcacttgccgaccgggattgttgttgaatgtcaggatgaacgttcacaacataaaaacaaagctaaagcactttctgttctcggtgctcgcatccacgctgctgaaatggcaaaacgccaacaggccgaagcgtctacccgtcgtaacctgctggggagtggcgatcgcagcgaccgtaaccgtacttacaacttcccgcaggggcgcgttaccgatcaccgcatcaacctgacgctctaccgcctggatgaagtgatggaaggtaagctggatatgctgattgaaccgattatccaggaacatcaggccgaccaactggcggcgttgtccgagcaggaataatggaatatcaacactggttacgtgaagcaataagccaacttcaggcgagcgaaagcccgcggcgtgatgctgaaatcctgctggagcatgttaccggcagagggcgtacttttattctcgcctttggtgaaacgcagctgactgacgaacaatgtcagcatcttgatgcgctactgacacgtcgtcgcgatggtgaacccattgctcatttaaccggggtgcgagaattctggtcgttgccgttatttgtttcgccagcgaccttaattccgcgcccggatacggagtgtctggtggagcaggcactggcgcggttgcctgaacaaccttgccgtattctcgatctcgggacgggtaccggggcgattgcgcttgcgctggctagcgagcgcccggactgcgaaattatcgctgtagatcgtatgcctgatgctgtctccctggcacaacgtaatgcccagcatctggcgatcaaaaatatccacattctgcaaagcgactggtttagcgcgctagccgggcagcagtttgcgatgattgtcagcaatccgccgtatattgacgagcaggaccctcatcttcaacaaggcgatgtccgctttgagccgctcactgcgctggttgcggcagacagtggaatggcagacatcgtgcatatcatcgaacagtcgcgtaacgcgctggtatccggcggctttctgcttctggaacatggctggcagcagggcgaagcggtgcgacaagcatttatcctcgcggggtatcatgacgtcgaaacctgccgtgactatggtgataacgagcgcgtaacgctcggccgctattatcaatgacaagtttttctacactgcttagtgttcatcttattagtatcgcgctttctgttgggctattaaccttacgtttctggctacgttatcagaagcatccacaggcatttgctcgctggacgcgcattgtgccgccggttgtcgatacgctgttactgttaagcggcattgcgttgatggctaaagcgcacatcctgccattttccgggcaggcacagtggctgactgaaaagctgtttggagttatcatttatatcgttttgggttttattgcactcgattatcgtcgtatgcacagtcagcaggcgcgcattattgccttcccgctggcgttggtggtgctgtacatcatcattaaactcgccaccacaaaagtaccgttactggggtaagtcatgagatcgttagctgatttcgaatttaataaagcgccattgtgcgaaggcatgatcctggcttgcgaagcaatccgccgcgattttccctcgcaagatgtttacgacgaactggagcgtctcgttagtctggcgaaggaagaaatcagccagcttctgcctttagaagagcagttggaaaaactgatcgcgctgttttacggcgactggggatttaaagcctcacgcggtgtttatcgtctttccgatgcattatggctggaccaggtgttaaagaatcgacagggcagtgcggtatcattaggtgcggttttattatgggtcgcgaatcgtctcgatttgccgctgctgccggtgattttccctacgcagctgatattgcgcattgaatgtccggatggcgaaatttggctgattaatccttttaacggtgaatcgttaagcgaacatatgctggacgtatggttaaagggaaatatcagcccgtcggcggaactgttttatgaagaccttgatgaagctgataacattgaggtaatccgcaaattgctggatacactcaaagcctcgttgatggaagaaaatcagatggagctggcgttacgcaccagcgaagctttattacaattcaaccctgaagatccctatgaaattcgcgatcgcgggttgatttatgcgcaactggattgcgaacacgttgcgttgaacgatttaagttatttcgttgaacagtgtccggaagacccgatcagcgaaatgatccgtgcgcaaataaataacatcgcgcataaacatattgtgctgcattaattaatcgacattttactcaagattaaggcgatcctatgaaacaaaaagtggttagcattggcgacatcaacgtagcaaatgacctgccgttcgtactgtttggcggtatgaacgtgttggaatctcgcgatctggcgatgcgcatttgcgagcactacgtaactgtgacccagaaactgggtatcccttacgtgttcaaagcctcttttgacaaagccaaccgctcctccatccactcttatcgtggaccgggcctggaagaagggatgaaaatcttccaggagttgaagcagacttttggcgtgaaaattatcaccgacgttcacgaaccaagtcaggcacagcccgttgctgatgtcgtggatgtgattcagttgccggcgtttcttgctcgccagactgacctggttgaagccatggcgaaaaccggtgcggtaattaacgtcaagaaaccacagtttgtcagcccgggacagatgggtaatatcgttgataaattcaaagaaggcggcaacgaaaaagtgattctttgcgatcgcggtgctaacttcggctatgacaacctggttgtcgatatgctgggcttcagcattatgaagaaagtgtctggtaactcgccggtgattttcgacgtgacccacgcactgcaatgccgcgatccgtttggcgcagcttccggtggtcgtcgtgctcaggtggctgagctggcacgagccggtatggcggtaggtctggcggggctgtttattgaagcgcatccggatccggaacatgcgaaatgtgatggtccatccgcgctgccgctggctaaactggaaccgttcctcaagcagatgaaagcgattgatgatctggtgaaaggtttcgaagaactggataccagcaagtaatcttttttgcttgaaaaataaagtattagcgttctgcgttaagacttttttcatgggtgccggatacaaaaaaggccgcaggctgttacccctgcggccggtttcgggcgcatattgccatcacggcagcctgacgcccgttttcaccttacttccggttacgccaccagctgacaatcgctgcggtaataattcccgccaggatcggtgctgccaggtcgtgccagaaaatcatggcaaactgcgcgagcgtcatatagccgccttgttgtaatgacaacattttgcggctattcttgaattgttctggttcaagattagcccccgttctgttgtcaggttgtacctctcaacgtgcgggggttttctctttccagcaaccaatgccaccagggataaagcccccgcaacattgcgcctcaccggataacgccggcttggtgtggatactacgactcaattcatcttcacttcatccctgaaatgtttgcaatgaagagtgcattccggtttttcaacagctgttacagtcatttcatgagtgctctggatgaggcttccagctcgggttgccaatatttacttgtggaagtgataaagacaaaaatggccgcaggctgttacccctgcggccggtttcgggcgcatattgccatcacggcagcctgacgcccgttttcaccttacttccggttacgccaccagccgacaatcgctgcggtaataattcccgccaggatcggtgccgccaggtcgtgccagaaagtcatggcaaactgcgcgagcgtcatatagccgccttgttgtaatgacaacattttgcggctattcttgaagtgtctggtttcaagattagcccccgttctgttgtcaggttttacctctcaacgtgcgggggttttctctttccagcaaccaatgccaccagggataaagcccccgcaacattgcgcctcaccggataattccggcttggtgtggatactacgtctcaattcatcttcacttcatccctgaaatgtttgcaataaagagtacattccggcttttcaacagctgttgcagtcgtttcatgagtgctctggatgatgcttccagctcgggttgccaatatttacttgtggaagagataaagacaaaaatggccgcaggctgttacccctgcggccggtttcgggcgcatattgccatcacggcagcctgacgcccgttttcaccttacttccggttacgccaccagctgacaatcgctgcggtaataattcccgccaggatcggtgctgccaggtcgtgccagaaaatcatggcaaactgcgcgagcgtcatatagccgccttgttgtaatgacaacattttgcggctattcttgaagtgtctggtttcaagattagcccccgttttgttgtcaggttttacctctcaacgtgcgggggttttctctttccagcaaccaatgccaccagggataaagccccgcaacattgcgcctcaccggataacgccggcttggtgtggatactacgtcgcaattcatcttcacttcatccctgaaatgtttgcaatgaagagtacattccggcttttcaacagctgttgcagtggtttcgtgcagggtgtggtacaggctcgcaattctgattaacgacctgtccaggtagtatgaagaaatacaataagcaggaatttatattatctcccccgattaccgtcatcggaggagatataactgtcaggcaaatatcgtcatcaaataggcggcaaacagtgccagatgcgctgcgccattgagcacgttagtacgtccggtggagaaggagatatggcacagcactaaagaggccaccatcaccaccatttctggcgcaccaagtgcaaactgcaattcgttacccgtcataaaggcaattagcgtgacgacaggtacggtaagcgaaatggttgctaacactgaaccaaagaacagattcatcgcgcgctgaacctggttgttcaacactgcttttaatgcacctaaaccttccggcgacagaatcaacagtgccaccaggaagccagtaaaggcgacaggggcattcatgctgtcgagcaatgtctccagcgagctggcgttcattttggtcaccgcaataacggcaatcagatggataatcaaccagatagcatgccacaggctgctatgggcagacggtttaccgtgatgcgggtcgtcatcatcactgtcatcttcgtgctcgtagacaaacaaactttgatgcgttttggtctggatcagcaaaaatacgccatacattgccgcagaaattaatgctaccagtaacgcctgaccggttgaaaaattcgccgcaggcagagccattggaaataccagtacgattatcgccagggggaacagcgcaattaaatactgcttgataccaaacagattcatatattgggtggcaaacttacgaccgcccaacaataatgaaaagccaaccagcccaccggtaacaatcataatgattgaatagagcgtatcacgcattagcgttggcgcggcgtcgccggttgccattaaagctgaaatcaaactgacttcaagaataaccactgaaaggctaagaataagcgaaccgtaaggttctcccaggcgatgggctaatacgtccgcatgacggacaacactaaaggcgctacttaaaataccaataagcgcaagaagattgatggcaatgaccactggtagtgtctggctgcttccccacaggaacagcactaccagcgccagaaccgggaaaataagcgaagtctccttgtggcgggtttttaccgcctcttgagcatttgacattatggttatccctttgcagatgaatttatcgaaaatgtaaaaaataggtaggaaaaataacagaaagtgtctggatatcggtaacattttacgaatttttaccccgctgtcgattttttactcattggggcataaaaataagtattacgtttagacaatgtttgttttagcgtttcttaagaagagtctgacctgaaaattcttatgttttggcaagagtagatattgttgaccacacttaatgttcaactttgtaaaaggagtcaacgatgccgtataaaacgaaaagcgatctgccggaaagcgtaaagcacgttctaccgtctcatgcccaggatatctataaagaagcgttcaacagcgcatgggatcaatataaagataaagaagatcggcgtgatgacgccagtcgcgaagaaaccgcgcataaagtggcctgggctgctgtgaagcatgaatatgccaaaggggatgatgataaatggcataaaaaatcgtaaaaccggtcgcttagttaaagctattcgtgcggtgttgccttgcaagtggtccgtggattgcatattgtcccgttagtggtttcaaaatgagcagtaaaaatgtccggaagacaccaaaaagttgtcgcagggaagtatgcagtggcggaggtgtaaggtgataacgcgtgatttcttgatgaatgccgattgtaaaacggcatttggtgccattgaagaatcactcttatggtcagcagaacaacgggcggcttcgctggcggcgacgctggcttgtcgacctgatgagggaccggtgtggatcttcggctatggatcgttgatgtggaatccggcactggagtttaccgaatcgtgcaccggtacactggttggatggcatcgcgcattttgcctgcgcctgaccgccgggcgcgggactgcgcaccagccgggacggatgcttgcactgaaagagggcggacgcaccacaggcgtcgcctatcgactgccagaagagacgctggagcaggaactaaccctgttgtggaagcgagagatgattaccggctgttatctgccaacctggtgtcagcttgatcttgatgatggacgcacagtaaacgccattgtgtttattatggacccgcgacatccagaatatgaatctgatactcgcgctcaggtcatcgcgccgttgattgcggcggcgagcggtccgctgggaaccaacgcacaatacctgttttcactggaacaggagcttatcaaactgggaatgcaggacgatgggctgaatgatttgctggtatcggtaaaaaaactgctggcggagaattttccggatggtgtgttacgtccgggattcgcctgagtaaacttcccgcatagtggggcgtcagacgccccctcaaacattaaaatgtgagcactttatcggctgacagcgtccattgcgccagttccacaagagtaccgatttccaccccatcaatcagaggaagtgtactaatcccgcgcccgtcggtacaggttttgcacaatttcaccggtacattctgagcggtaaggatctccagcatttgctgaatgttgtagccttcccctggtttttgcccgcgcaacccggctgtgaccgcatcagacatgaggaacagacgcagatccagattgctctcctgctctcgtaacgcaatggccagccgcaagctgttaaacaaggattcgctcccgtaaggtgcgccattggcaacgatcacgattttttgcattatttactcctgtattcagggaattagacactcatcttctatcttactgcttctgcagcgtctgaccaatcggtcacatttttaaggattttcctgaaagcgcgagaaaatacgacaaaagttgccagtaatcgttattctttaaggctatggtttttcattattaccggaagttaccgacgttttgagccgtttcgttcctcgcattatcccgttttatttactcttgcttgtagcaggcggtacagctaacgcacaatctaccttcgagcaaaaagcggcaaatccctttgataataacaatgatggtctgccggatttaggcatggctcccgaaaatcatgatggggaaaaacactttgctgaaattgtgaaagatttcggcgaaaccagtatgaatgataacgggctggatactggcgagcaggcaaaagctttcgcattgggaaaagtccgcgacgcgcttagtcaacaggttaatcagcacgtagagtcctggctatcaccgtggggaaatgccagtgttgacgtcaaagtggataacgaaggacatttcaccggcagtcgtggaagctggtttgtgccgttacaagataatgatcgttatctcacctggagccagcttggtcttactcagcaggataatgggttggtgagcaatgtgggcgttgggcaacgctgggcgcgcggcaactggctggtgggttataacactttttatgacaacttgctggacgaaaatcttcagcgagcgggctttggtgccgaagcgtggggcgaatatttgcgattatcggcaaacttttatcagccgtttgctgcatggcatgaacagacagccacgcaggaacaacggatggcgcgcgggtacgacctgacagctcggatgcgcatgccgttctatcaacacctcaataccagtgtcagcctagaacagtattttggtgatcgtgttgatttgtttaactctggtacgggttatcacaatcccgtcgcgttgagtctgggattaaattacacccctgtgccattagtcactgtgacggcccagcataaacagggtgaaagtggcgaaaatcaaaataacctcgggctgaatcttaattaccgctttggtgtaccgctcaaaaaacaactttctgcgggcgaggttgccgaaagtcagtcgttacgtggtagtcgctatgacaatccgcagcgaaataatctaccgactcttgagtaccgacagcgaaaaacgttaacggtgtttctggcgacaccgccgtgggatctaaaacctggcgaaacagtgccgctgaaattacaaatccgcagtcgttacggtattcggcaactgatttggcagggcgatacgcagatattaagtttgacgccgggcgcacaagccaacagcgcggagggctggacgctgatcatgcctgactggcagaacggggaaggggcaagcaatcactggcgattgtctgtggtggtggaagataaccaggggcagcgtgtctcctccaatgagatcacgctaacgcttgtcgaaccgttcgatgcattgtcaaacgacgaactgcgctgggaaccgtaatcagaaaatgcgctcctgatgcacccataccgctgcttccacgcgagacttgagcttcattttcttcagcatgtgcttgacgtgcacttttactgtgctttcggtgatatccaggcggcgggcaatcatcttgttcggcaaaccctgggcaatcagcttgagaatatcgcgctcgcgtggggttaactggttaacatcgcgctcagtagtggcacggttagcgcgcaagctggcggccagaacaggcgttaatgcttcgcttaataccatttcgccagcagctgcctgatgcaatgctttcagcagatcttccggttccatatcttttaacagatagccatccgcgccgcgtttcagtgcggtgaccacatcttcttcatggttagagacgctgaataccacaatgcgccctgagagggacttttcgcgcagtttatccagcgtttccagaccgttcatgccgggcatattgagatctaacaggatcagatcgggatcaagagactccgccagttcaataccctgttcgccattactcgcttcgccaaccacggtgatatctggtgccatactgataagctgttttacgccagttcgcagcatcgggtgatcgtcaatcagcaggatagtagccggttcctgattactcatgggtatctccttggacgtctgtgaaagttttttcgggaataaaggtgaccaccacttcggtgccacctgattcacgacggcggacgcggcaatcgcctcgtaaactttgcgcacgatcgcgcattattatcatgccgtagtgattgctgcggatggcattttcaggcacgccgcagccgttatcctggacggtcagtttgacctgattatcgttttgcgccaccgtcaccacgacttcactcgcttgcgaatgtttgagggcgttacttaatgcctcacgggcaatttgcaacaagtggattgcctgatgcgaaggcaccaggcgaggcggcaattgataatccagcttcaccgggaagccaaatttggcgctgtactcttcgcaactcgcctccagcgccggacgtaatccaggctcggtgagctgcaagcggaatgtggtgagcaattcacgcaactgcgcccaggatgcattcagttcgttacggatctgacttaacagttcgcggctgctttctggcagcgcatcgccctgcatctgtaaacaactcacctgcatcttcatgcaagagagagattgggcaatagaatcatgcagttcgcgcgcaatggtggcacgctcttccatcacgatcaactgttgctgacgttcctgatggcgatccagcgccagcgtggcggtgagttgttcaaccagggtatccaccagttgttgttgatcatggctaagatgacgcccctgcggcagggtcgccagcaaaataccgtactgcgtatgagagtcagccagccgccacttcagggtcgtgccgcgatcaccaacgggtaatacgccgcgcgggcagagctggcagcctttatcatcacaagtcatatctggctggcaggtaaactcctgatgattctcttcatcatcagtgtcatacacccgcaattcgatatcacgtagcagggttaaattctgtaagccgttgagtacaggtgacaggcgttcacacagcggggcgcgggaatgcaaacggcggttagcctgccataaaaaagagaggatctgatttttatgctccagcccggcggttttctcctgaacccgctgctcaagtacggcataactttcggccagttctgcagacatattgttcaacgcagttccaagcatcgccatttcgttgcgcccgctgatgtttgcgcgttgggtaaaatcgcgatgactgacggcactcgccattgccagcagttgccgccacggttgtagcagtcgcgcccgcaaccagataatagtgaacaccagtaaaagtgccataaataccgccattacccgatggaccagtaccactgtctcgatgcgcatttccgtggtgcggtcaaaaccagataccagttgatcaagcccggcaacaaactggctgacatccgctgacaccgtttctcggttttgtgcacgcatcagcgcagggatcagttcattacgccagtaatcttgtaaaccctgtaattgcgccagttgtccgtctcgttctgctgctcgagtcaactcggcgctaaatgccgtttgttccatctctttaattaagggcttgtctttctcgcttaatggcactgccgccaacagacggtaactttgcatgcgcagcgatcccgctttgttgatcgcatgggcgctgccctgaacgccttgcaccagccagccagaaaccgccatccctgccagtccaatagcagtagaaagcaacacaataagcgcaacctgattaaccagggtgagcggagagagacaacgtttaagcatgtaaacctcttccttcaggctttaaatgagcaataaccttaatgaatgtgacgatacattctggaatggcagtattctcggctattggctgaagtatacccatacccggaaagagttactccttatttgccgtgtggttagtcgctttacatcggtaagggtagggattttacagcaccgtgaaaaatctcataatttttatgaagtcactgtactcactatgggtaatgataaatatcaatgatagataaagttatcttatcgtttgatttacatcaaattgcctttagctacagacactaaggtggcagacatcgaaacgagtatcagaggtgtctatgagtcactcatccgcccccgaaagggctactggagctgtcattacagattggcgaccggaagatcctgcgttctggcaacaacgcggtcaacgtattgccagccgcaacctgtggatttccgttccctgtctgctgctggcgttttgcgtatggatgttgttcagcgctgttgcggtgaacctaccgaaagtcggctttaattttacgaccgatcagctatttatgttgactgcgctgccttcggtttctggcgcgttattacgtgttccatactcctttatggttcctatcttcggtggtcgtcgctggacggcgttcagcaccggtattctgattattccttgcgtctggctgggttttgccgtgcaggatacctccacgccttatagcgtcttcatcatcatctctctgctatgcggctttgctggcgcgaacttcgcatccagtatggcaaacatcagcttcttctttccgaaacagaagcagggtggcgcgctgggtctgaatggtggtctgggaaacatgggcgtcagcgtcatgcagttggttgctccgctggtggtatcactgtcgattttcgcagtatttggtagccagggcgtcaaacagccggatgggactgagctgtatctggcgaatgcgtcctggatatgggtgccgttccttgccatcttcaccattgcggcgtggtttggcatgaacgatcttgctacctcgaaagcctccatcaaggagcagttgccggtactcaaacggggtcatctgtggattatgagcctgctgtatctggcaaccttcggctccttcatcggcttctccgcgggctttgcaatgctgtcaaaaacgcagttcccggatgttcagattctgcaatacgctttcttcgggccgtttattggtgcgctggcgcgttctgcaggtggtgcattatctgaccgtctgggcggaactcgtgtcacgctggtgaactttattctgatggcgattttcagcggcctgctgttcctgaccttaccgactgacgggcagggcggaagcttcatggcgttcttcgcggtcttcctggcgctgttcctgacagctgggctgggtagtggttccactttccagatgatttcagtgatcttccgtaaactgacaatggatcgcgtgaaagcagaagggggttctgacgaacgtgcgatgcgtgaagcggcaaccgacacggcggcggcgctgggtttcatctctgcgattggcgcgattggtggcttctttatcccgaaagcgtttggtagctcgctggcattaacgggttcgccagtcggcgcaatgaaggtatttttgattttctatatcgcctgcgtagtgattacctgggcggtatatggtcggcattctaaaaaataaaccgttactcgtcatacttcgggttacatgtgctgcggctgcgttcattcaccccagtcacttactttagtaagctcctgggattcattcacttgccgccttcctgtaaaccgaattatatagagtaaaatatttgattatcctttgcgcggcatgatgtcgcgctttttttatgcgtcatttagttacaacatactaatgttatatggtttatttcgccggatttcattaagagccattaatatgttacccatggggaatactccttaatacccatctgcataaaaatcttaatagtttaaataactacaggtataaaacgtcttaatttacagtctgttatgtggtggctgttaattatcctaaaggggtatcttaggaatttactttatttttcatccccatcactcttgatcgttatcaattcccacgctgtttcagagcgttaccttgcccttaaacattagcaatgtcgatttatcagagggccgacaggctcccacaggagaaaaccgatgagtaaattcctggaccggtttcgctacttcaaacagaagggtgaaacctttgccgatgggcatggccagcttctcaataccaaccgtgactgggaggatggatatcgccagcgttggcagcatgacaaaatcgtccgctctacccacggggtaaactgcaccggctcctgcagctggaaaatctacgtcaaaaacggtctggtcacctgggaaacccagcagactgactatccgcgtacccgtccggatctgccaaaccatgaacctcgcggctgcccgcgcggtgccagctactcctggtatctttacagtgccaaccgcctgaaatacccgatgatgcgcaaacgcctgatgaaaatgtggcgtgaagcgaaggcgctgcatagcgatccggttgaggcatgggcttctatcattgaagacgccgataaagcgaaaagctttaagcaggcgcgtggacgcggtggatttgttcgttcttcctggcaggaggtgaacgaactgatcgccgcatctaacgtttacaccatcaaaaactacggcccggaccgtgttgctggtttctcgccaattccggcaatgtcgatggtttcttacgcatcgggtgcacgctatctctcgctgattggcggtacttgcttaagcttctacgactggtactgcgacttgcctcctgcgtctccgcaaacctggggcgagcaaactgacgtaccggaatctgctgactggtacaactccagctacatcatcgcctgggggtcaaacgtgccgcagacgcgtaccccggatgctcacttctttactgaagtgcgttacaaagggaccaaaactgttgccgtcacaccagactacgctgaaatcgccaaactgtgcgatctgtggctggcaccgaaacagggcaccgatgcggcaatggcgctggcgatgggccacgtaatgctgcgtgaattccacctcgacaacccaagccagtatttcaccgactatgtgcgtcgctacaccgacatgccgatgctggtgatgctggaagaacgcgacggttactacgctgcaggtcgtatgctgcgcgctgctgatctggttgatgcgctgggccaggaaaacaatccggaatggaaaactgtcgcctttaataccaatggcgaaatggttgcgccgaacggttctattggcttccgctggggcgagaagggcaaatggaatcttgagcagcgcgacggcaaaactggcgaagaaaccgagctgcaactgagcctgctgggtagccaggatgagatcgctgaggtaggcttcccgtactttggtggcgacggcacggaacacttcaacaaagtggaactggaaaacgtgctgctgcacaaactgccggtgaaacgcctgcaactggctgatggcagcaccgccctggtgaccaccgtttatgatctgacgctggcaaactacggtctggaacgtggcctgaacgacgttaactgtgcaaccagctatgacgatgtgaaagcttataccccggcctgggccgagcagattaccggcgtttctcgcagccagattattcgcatcgcccgtgaatttgccgataacgctgataaaacgcacggtcgttcgatgattatcgtcggtgcggggctgaaccactggtatcacctcgatatgaactatcgtggtctgatcaacatgctgattttctgcggctgtgtcggtcagagcgggggcggctgggcgcactatgtaggtcaggaaaaactgcgtccgcaaaccggctggcagccgctggcgtttgcccttgactggcagcgtccggcgcgtcacatgaacagcacttcttatttctataaccactccagccagtggcgttatgaaaccgtcacggcggaagagttgctgtcaccgatggcggacaaatcccgctataccggacacttgatcgactttaacgtccgtgcggaacgcatgggctggctgccgtctgcaccgcagttaggcactaacccgctgactatcgctggcgaagcggaaaaagccgggatgaatccggtggactatacggtgaaatccctgaaagagggttccatccgttttgcggcagaacaaccagaaaacggtaaaaaccacccgcgcaacctgttcatctggcgttctaacctgctcggttcttccggtaaaggtcatgagtttatgctcaagtacctgctggggacggagcacggtatccagggtaaagatctggggcaacagggcggcgtgaagccggaagaagtggactggcaggacaatggtctggaaggcaagctggatctggtggttacgctggacttccgtctgtcgagcacctgtctctattccgacatcattttgccgacggcgacctggtacgaaaaagacgacatgaatacttcggatatgcatccgtttattcacccgctgtctgcggcggtcgatccggcctgggaagcgaaaagcgactgggaaatctacaaagccatcgcgaagaaattctccgaagtgtgcgtcggccatctgggtaaagaaaccgacatcgtcacgctgcctatccagcatgactctgccgctgaactggcgcagccgctggatgtgaaagactggaaaaaaggcgagtgcgacctgatcccaggtaaaaccgcgccacacattatggtcgtagagcgcgattatccggcgacttacgaacgctttacctctatcggcccgctgatggagaaaatcggtaatggcggtaaagggattgcctggaacacccagagcgagatggatctgctgcgtaagctcaactacaccaaagcggaaggtccggcgaaaggccagccgatgctgaacaccgcaattgatgcggcagagatgatcctgacactggcaccggaaaccaacggtcaggtagccgtgaaagcctgggctgccctgagcgaatttaccggtcgtgaccatacgcatctggcgctgaataaagaagacgagaagatccgcttccgcgatattcaggcacagccgcgcaaaattatctccagcccgacctggtctggtctggaagatgaacacgtttcttacaacgccggttacaccaacgttcacgagctgatcccatggcgtacgctctctggtcgtcagcaactgtatcaggatcaccagtggatgcgtgatttcggtgaaagcctgctggtttatcgtccgccgatcgacacccgttcggtgaaagaagtgataggccagaaatccaacggcaaccaggaaaaagcgctcaacttcctgacgccgcaccagaagtggggtatccactccacctacagcgacaacctgctgatgctgactttaggtcgcggtggtccggtggtctggttgagtgaagccgatgccaaagatctgggtatcgccgataacgactggattgaagtcttcaacagcaacggtgctctgactgcccgtgcggttgtcagccagcgtgttccggcagggatgaccatgatgtaccacgcgcaggaacgtatcgttaacctgcctggttcggaaattacccaacagcgtggtggtatccataactcggtcacccgtatcacgccgaaaccgacgcatatgatcggcggctatgcccatctggcatacggctttaactactatggcaccgtaggttctaaccgcgatgagtttgttgtagtgcgtaagatgaagaacattgactggttagatggcgaaggcaatgaccaggtacaggagagcgtaaaatgaaaattcgttcacaagtcggcatggtgctgaatctcgataagtgcatcggctgccacacctgttcagttacctgtaaaaacgtctggaccagccgtgaaggcgtggaatatgcgtggttcaacaacgtggaaaccaagccgggccagggcttcccgactgactgggaaaaccaggaaaaatacaaaggcggctggatccgtaaaatcaacggcaaactgcagccgcgcatgggtaaccgtgccatgctgctgggtaaaatcttcgctaacccgcatctgccggggatcgacgattattacgagccgttcgattttgactatcagaacctgcataccgcgccggaaggcagcaaatcgcagccgattgcccgtccgcgttcgctgattaccggggaacggatggcgaaaatcgaaaaagggccgaactgggaagatgacctgggcggtgagtttgacaaactggcgaaagacaagaacttcgacaacatccagaaggcgatgtatagccagttcgaaaacaccttcatgatgtatttgccgcgcctgtgcgaacactgcctgaacccggcatgtgtggcgacctgcccgagcggtgcgatttacaagcgtgaagaagatggcatcgtcctgatcgaccaggataaatgccgtggctggcgtatgtgcatcactggatgcccgtacaaaaaaatctacttcaactggaagagcggtaagtctgagaagtgcatcttctgctatccgcgtattgaagcgggtcagccgaccgtgtgctcagaaacctgtgtcggtcgtatccgttatcttggcgtgctgttgtacgatgccgacgctattgaacgtgcagccagcaccgagaacgagaaagatctttaccagcgtcagctggacgtgttcctcgatccgaacgatccgaaagtcatcgagcaggcgattaaagacggtattccgctgagcgttattgaagccgcacagcagtcgccggtttataaaatggcaatggaatggaaactggcgctgccgctgcatccggaatatcgcacactgccgatggtctggtacgtgccgcctctgtctccgattcagtctgcagcagacgcgggtgagctgggtagcaacggcattctgccagacgtcgaaagcctgcgtattccggtacagtatctggcgaatctgctgaccgccggtgataccaaaccggtactgcgcgcactgaaacgtatgctggcgatgcgtcattacaaacgtgctgaaaccgttgacggtaaagttgatacccgtgcgctggaagaggtcggtctgaccgaagcccaggcacaggagatgtaccgttatctggcgattgctaactacgaagatcgctttgtggtgccgagtagtcatcgtgaactggcacgggaagccttcccggagaaaaatggctgcggctttacctttggtgatggctgccacggttcagataccaaattcaatctgttcaacagccgtcgtatcgatgccatcgatgtgaccagcaaaacggagccgcatccatgatcgaactcgtgattgtatcgcgtctccttgaatatccggatgctgccttatggcagcatcaacaagagatgtttgaggcgattgccgcgtcgaaaaatctgccaaaagaggatgcccatgcgctgggcattttcctgcgcgatttaacgacgatggatccgctcgatgcccaggcgcagtacagcgaactgttcgaccgtggccgcgccacgtcactgttgctgtttgaacatgtgcacggcgaatcccgcgaccgcggccaggcgatggtggacctgctggcgcagtacgagcagcacggcttgcagttaaacagccgcgaattgccggaccatctgccgctgtatctggagtacctggcgcagctgccgcaaagcgaagccgtggaaggtttgaaagatatcgcgccgattctggcattgctgagcgcgcgtctgcaacagcgtgaaagccgttatgccgtgctgtttgatctgctgctgaaactggcgaataccgctatcgacagcgacaaagtggcggaaaaaattgccgacgaagcgcgcgatgatacgccgcaggcgctggatgctgtctgggaagaagagcaggttaaattctttgctgacaaaggctgcggtgattcagcaatcactgcgcatcagcgtcgctttgccggtgccgtcgcgccgcaatatctgaatatcaccaccggaggacagcactaatgcaattcctgaatatgttcttctttgatatctacccgtacatagccggggcggtcttcctgattggtagctggctgcgttatgactacgggcagtacacctggcgcgcggcgtccagccagatgctggatcgcaaagggatgaacctggcgtcgaacctgttccatatcgggattctggggatttttgtcggtcacttcttcggtatgctgacgccgcactggatgtatgaagcctggctgccgattgaagtgaaacagaaaatggcaatgtttgctggtggtgccagcggcgtgctgtgtctgattggcggcgtgctgttgctgaaacgtcgtctgttcagcccacgcgtgcgtgcaaccactaccggagcggatatcctgatcctgtcgctgctcgttatccagtgcgcgctgggcctgttgaccattccgttctccgctcagcatatggacggtagcgagatgatgaaactggttggctgggcgcagtcggtggtgaccttccacggtggcgcttctcaacacctcgatggtgtggcgtttatcttccgtctgcacctggtgctggggatgacgttattcctgctgttcccgttctcgcgtctggtacacatctggagcgtaccggtggagtatctgacacgtaagtaccagctggtgcgcgctcgtcactaagcgaattttagttcacatagaccctgcttcggcggggtttttttatgggcacggtgcggggtgagttgtcggatgcgcttcgcttatccgacctacaggggaggatattgtaggcccggtaaacgtggtgccatcgggcaaaattagctcggagtaacaggttttgattatttaaggaagcgatggtggtgggggaaggattactcagcgctgcgcgcttcgcccttcgggtcgttgcctgcggcaacgctctctcgctggcgctcaagtcgaaccttggtcgaagcttctcatccttccccgcttgggcagaatatttgattgcggattcgtttgagaattccggggcttttgaaagtgatggtggtgggggaaggattactcagcgctgcgcgcttcgcccttcgggtcgttgcctgcggcaacgctctctcgctgacgctcgagccgaaccttagtcgaagcttctcatccttccccgcatgggcagaatatttgattgcggattcgcttgagagttcagggacttttgaaagtgatggtggtgggggaaggattactcagcgctgcgcgcttcgcccttcgggtcgttgcctgcggcaacgctctctcgctggcgctcgagtcgaaccttggtcgaagcttctcatccttccccgcatgggcagaatatttaattgcggattcgttgggaagttcagggacttttgaaagtgatggtggtgggggaaggattcgaaccttcgaagtcgatgacggcagatttacagtctgctccctttggccgctcgggaaccccaccaggggtaattcaaattttgaggtaatgcttgagatggtggtgggggaaggattattcgtcgcttcgctcctcacccttcgggccgttgcctgtggcaacgttctctcgctttcgctcgaatcgaaccttagtcgaaggttctcacccttccccgatgagtgcaaactttcacaatctcaccgaagttaccacatcgctgtggtgaattatggtggtgggggaaggattcgaaccttcgaagtcgatgacggcagatttacagtctgctccctttggccgctcgggaaccccaccacggggtaatgctttttactggcctgctcccttatcgggaagcggggcgcatcatatcaaatgacgcgccgctgtaaagtgttacgttgagaaaaatgaactggttgcgtaattttcatccgtaacggattaaaggtaaccagttatttttgctggcgattaaagaataatcgttcgattaccgtaaacaaagacgcgctgtgccagtactttgtatagtgcacgacttaagacgtttttctcgacgtcacgacctgcgcgcatcatatcttcagctgtgtaggtatgatcgacatgaataacgtcctgcatgatgattgggccttcgtccagattgtcattcacatagtgagcggttgcgccaataatcttcacaccacgttcataggcctggtgataaggacgtgcgccaataaacgctggcaggaatgaatggtgaatattgatgatcttattcgggaagcgtgccacaaattccggcgttaatacccgcatatacttcgccagcaccacgtagtcaggttgataagcatcaatggcatccgccatcttttgatcgtgctcgttgcgggttaacccttcatggcttaccagctcaaacggaatatcaaaacgctcaaccagagaacgtaaagtatcgtggttaccaataactgccgcgatttcgacatccaggccgccgtaattggctttcatcaacaaatcgccaaggcaatgcgcttctttagtgaccagaatcactatccggcgacgaccggcaggattcagctcacgcacggagccttctggcaatgcgctatcgagatccgccagcagggtggaatcattaaaaatcccttccagttccgtgcgcataaaaaagcgcccggtacggtgatcaacaaattcattgttctgtacgatatttaactcgtgcttgtagcaaatattggtaatacgtgcgatcagacctttttggtccggacaaatagtacgcagaactttacgttggagtgaatgcattgctggaaaaaccttgttgagagtgtttgctaaaccgtaccgtcaaccattattggccgcagcactttttaaattttttacctgaaccacaagggcagggatcgttgcgaccaaactgcggacgtgtaccgtcaatatagtaccattgaccgttttctttcaaaaatcgcgaacgttcaattattgcacctgttttaccaccttcggtaaatcgagcaacaaaactgacaaatccgatattgtcggcgtcctgccaacaatgttcaaatacggtcaatcccaaccattcagtatgcgcaaatccggccatcaattcggcacgtaacgccgctgctccacaagagggatgccaggtctttattaaataatctgcgtcttgcatcacaaaagcgcagtaacgcgaacgcatgagatgttctggatcaggtgcaaccttttcaccagacacataagggtggcaacataggctatactcgacagcactaccacagggacaaagctgagacacaaataatctccctggaaacaataacggcgtattaaccgcctgagtagcactatgttaaccgagcagtagcgatgtggctacgattgcattccaggggaatcttgcgggaataatgagaaagataaaaatagggctggcgctgggatctggcgcggcgagaggttggtcgcatattggcgttattaatgcgctaaaaaaagtgggtattgaaattgatatcgttgcaggatgttcaattggttcgctggtgggcgctgcctatgcatgcgatcgattatctgcgctggaagattgggtgacctctttcagttattgggatgttttacgcctgatggatctctcctggcagcgcggtgggttactgcgcggcgagcgtgtcttcaatcaataccgcgaaataatgccggaaacagagatcgaaaattgttcccgtcgctttgcggctgttgccaccaatttaagtacgggacgtgaattatggtttactgaaggcgatctccatcttgctattcgcgcatcatgcagtattccaggactcatggcacctgttgcacataacggctactggctggttgatggagcagtcgttaacccaattcctatttccctcacgcgtgcattgggggctgatattgtgatagcggttgacctgcagcacgatgctcatttgatgcaacaagatttgctctcctttaatgtcagtgaagaaaatagcgagaatggtgattctctgccgtggcatgcgcgtctgaaagaaaggttaggcagcataacgacacgtcgggcggtgacagcgccaacggcaacagagattatgaccacttctatccaggtgctggagaaccgccttaaaaggaaccgcatggcaggtgatccgcccgatattctgattcaacctgtttgcccgcaaatatctacgcttgatttccatcgcgcgcacgctgccattgcggccggacagctggcagtggaaaggaaaatggacgaacttttgccgttggtacgcaccaacatttgaccagaatttttatctacacttaagttaattctgacaggcgcaggtggcaatagcatgccactattgagtaaagccagtcaggggagagaacatgacgcagccattggtcggaaaacagattctcattgttgaagatgagcaggtatttcgctcgcttctggattcatggttttcctcattgggagcgacaacggtactggcggctgatggggtggatgcccttgagttgctgggaggtttcactccagacctgatgatatgtgatatcgcgatgccacgaatgaacgggcttaaactgctggagcatatacgtaacagaggcgaccagaccccagttctggtgatatctgccactgaaaatatggcagatattgccaaagcgttacgtctgggcgttgaagatgttttgctgaaaccagttaaagatctgaatcgcttgcgcgagatggtttttgcctgtctctatcccagcatgtttaattcgcgcgttgaggaagaggaaaggctttttcgcgactgggatgcaatggttgataaccctgccgcagcggcgaaattattacaggaactacaaccgccggttcagcaggtgatttcccattgccgggttaattatcgtcaattggttgccgcggacaaacccggcctggtgcttgatattgccgcactttcggaaaacgatctggcattttattgccttgatgtcacccgagctggacataatggcgtacttgctgccttgttattacgcgcattgtttaacggattattacaggaacagcttgcacaccaaaatcaacggttgccagagttgggcgcgttattgaagcaggtaaaccatttacttcgtcaggccaatctgccggggcagtttccgctattagttggctattatcatcgcgaactgaaaaatctcattctggtttctgcgggtctgaatgcgacgttaaataccggcgaacaccaggtgcaaatcagtaatggtgttccgttaggcactttaggtaacgcttatttgaatcaattgagccagcgatgcgatgcctggcaatgccaaatatggggaaccggtggtcgactgcgcttgatgttgtctgcagaatgagcaaacgataacgcgggctaaatttgcattacctgctaatgtcggctggtggtactatcgtcgccattcgtataagtaattgtcttaattatgctaactcgcctccttttcagaacttagccccttcggggtgctgatatactgggatgcgatacagaaatatgaacacgttcaaaacacgaacagtccaggagaatttaaatggctgccattaatacgaaagtcaaaaaagccgttatccccgttgcgggattaggaaccaggatgttgccggcgacgaaagccatcccgaaagagatgctgccacttgtcgataagccattaattcaatacgtcgtgaatgaatgtattgcggctggcattactgaaattgtgctggttacacactcatctaaaaactctattgaaaaccactttgataccagttttgaactggaagcaatgctggaaaaacgtgtaaaacgtcaactgcttgatgaagtgcagtctatttgtccaccgcacgtgactattatgcaagttcgtcagggtctggcgaaaggcctgggacacgcggtattgtgtgctcacccggtagtgggtgatgaaccggtagctgttattttgccggatgttattctggatgaatatgaatccgatttgtcacaggataacctggcagagatgatccgccgctttgatgaaacgggtcatagccagatcatggttgaaccggttgctgatgtgaccgcatatggcgttgtggattgcaaaggcgttgaattagcgccgggtgaaagcgtaccgatggttggtgtggtagaaaaaccgaaagcggatgttgcgccgtctaatctcgctattgtgggtcgttacgtacttagcgcggatatttggccgttgctggcaaaaacccctccgggagctggtgatgaaattcagctcaccgacgcaattgatatgctgatcgaaaaagaaacggtggaagcctatcatatgaaagggaagagccatgactgcggtaataaattaggttacatgcaggccttcgttgaatacggtattcgtcataacacccttggcacggaatttaaagcctggcttgaagaagagatgggcattaagaagtaacatccgtatcggtgttatccacgaaacggcgttgagcaatcgacgccgtttttttatagcttattcttattaaattgtcttaaaccggacaataaaaaatcccgccgctggcgggattttaagcaagtgcaatctacaaaagattattgcttgatcaggaaatcgtcgagggatttaccttgctcatccattgcttttttgattacagctggagtacggccttggccagtccaggttttagtttcgccgttttcgtcaacgtagctatattttgccggacgctgagcacgtttagctttggtgccagatttaacggcagcaaggctattcagcagttcgttcgggtcaataccgtcagcgatcagcatttcgcgatattgctgcagtttacgagtgcgctcttcaacttcagcagcagccgcgctttcttcttcgcgacgttcgttaacaacaacttctaatttttccagcatttcttccagcgtttcaagtgtacattctcttgcctgcgcacgaagagtacggatgttgttcagaattttaagtgcttcgctcattgtagtaatctcaaacttatattggggtggtttgttgaggtaataatagagccttaaattcagttgtgcaatagccaggaatgtaaggaattcaaaattgttctttattttgtgccgccaataaatatcttttcataaaattagccagaaaagacgcggcatatagccctatttacaccgatgatttcgcagcacgtgaggttaaaacttcctgattcatgtcacattttatggggagattatcgtaggctgacgacctttcagtcttctgtattagttgtgtttacgagaattccctattaagcgaatgatgaaaagtagaacagtcgcaataagagcatggacttagtattgcactatctcctggaggtcaacagagggctattacttgcgcaacaggttaaagattgtgaatagttaccagcagtcatttacccgcttataacaagcgaggcagttgtaatgatagctcagaaggattatgcaaggcttcgtaagggagaacgcatatacccacttctgtgcatactgttgagctgaaaaactgacgaattatgataaactccagccaactttatttcatatcattgagggcctgtggctgatggcacagctatatttctactattccgcaatgaatgcgggtaagtctacagcattgttgcaatcttcatacaattaccaggaacgcggcatgcgcactgtcgtatatacggcagaaattgatgatcgctttggtgccgggaaagtcagttcgcgtataggtttgtcatcgcctgcaaaattatttaaccaaaattcatcattatttgatgagattcgtgcggaacatgaacagcaggcaattcattgcgtactggttgatgaatgccagtttttaaccagacaacaagtatatgaattatcggaggttgtcgatcaactcgatatacccgtactttgttatggtttacgtaccgattttcgaggtgaattatttattggcagccaatacttactggcatggtccgacaaactggttgaattaaaaaccatctgtttttgtggccgtaaagcaagcatggtgctgcgtcttgatcaagcaggcagaccttataacgaaggtgagcaggtggtaattggtggtaatgaacgatacgtttctgtatgccgtaaacactataaagaggcgttacaagtcgactcattaacggctattcaggaaaggcatcgccacgattaataagaatttctttactgacagggtgagcagggcacttttatcctgtcagttcgttttacgcacttcttccgggctatatacccttctcggcagttttttaacgccgctatacgcctcacagggctcttaagcaccgacgttgacttgtgacctgtaaagtacaatatccctgtgtttaggcgttatacatcgtcgcaaatatgatgaaggctaatgctgtcggtttatggaaaagttgctttgggtaaacaaaaaatacggccccagaagggcaatgccgttcacttaagaggagcggcactatgtttcacaggataacgggtttttgatatcttaaccgacctcggccttgatggtcgggggcgttttgttatgaacaccacttccagagcaccccgaagatgctccagtcgtttcgggatggtccctggtgacgccgtgtttcccagctctatcatttctgatgcgatattcttccacgcaggcagtagccagtggcggttacaacccttctggttcagcgtcagcagcaggtcttcgctgtaaaaaagtttatcaaacaacgtaatagagttatccgggatggtggcgagcatggagtgggccagcacagtttcgctctgccggtaaggtgcggtcacggcattcagcagaatgtgacttcccaggttcattaaggccaccagacgcataaccgggtaggcgttctgccgcttagtggatgtgttggcagacccataatattcacgcagctcgggtttatcaggtgtcctgaactgtgcgccatcaatggcaaaaagttgcaggccgtgccagtcatccttcaggtaacgttccgcgcccctgtctgtgcggtctggcggaagagccattccactggggcggcccccacgcgctgacgcgcctgggtgacagcgctgcgggccagcaggttcatccccgcttcgccatccgcgctcaggttcagacggcgaacaacatcggtaattggctcattgcaccaccatccagataaccatgtcccccggtaaacgacggcggcgaacggtcgcatgagcagaaagcgtcaggcagtgttgtatccactcggtgggaaggtgttctgcaaatagttgtgcagagggcggaggcataagcggatggtcactgaaatcgagcagatcattgagaagtggcataagaaaacggctccctgttgtggaagccgttatagtgcctcagtttaaggatcggtcaactaatccttaactgatcggcattgcccagaaggggccgtttatgttgccagacagcgctactgattaagcggattttttcgcttttttctcagctttagccggagcagcttctttcttcgctgcagtttcaccttctacataatcacgaccgtagtaggtatccagcagaatctgtttcagctcggagatcagcgggtaacgcgggttagcgccggtgcactggtcatcgaatgcatcttcagacagtttatccacgttcgccaggaagtctgcttcctgaacgccagcttcacggatagatttcggaatacccagttcagctttcagcgtttccagccatgccagcagtttctcgatcttagcagcagtacggtcgcccggtgcgctcagacccaagtggtcggcaatttcagcataacgacggcgagcctgcggacggtcatactggctgaatgcagtctgcttggtcgggttgtcgttcgcattgtagcgaataacgttacaaatcagcagggcgtttgccagaccgtgcggaatatggaactgggaacccagtttgtgcgccattgagtgacatacacccaggaaggcgttcgcaaacgcgatacccgcgatagtcgctgcactgtgaacacgttcacgcgctaccggatttttagacccttcgtggtaggacgctggcagatattctttcagcagtttcagtgcctgcagagcctgaccatcagagaactcagatgccagtacagaaacataagcttccatggcgtgagttactgcgtccagaccaccgaaagcacacagggacttcggcatgtccataaccaggttggcgtcgacaatcgccatatccggagtcagcgcatagtctgccagcggatatttctgaccagtagcgtcgtcagttacaaccgcaaacggagtgacttcagaacctgtaccagaagtggtggtgacagcgatcattttcgctttcacgcccattttcgggaacttgtagatacgtttacggatatccataaagcgcagcgccagctcttcgaagtgagtttccggatgttcgtacataacccacatgatcttcgcggcgtccatcggggaaccaccacccagcgcgataatcacgtctggtttgaaggagtttgccagttctgcacctttacgaacgatgctcagggtcgggtccgcttctacttcgaagaagacttcagtttcaacgcctgctgctttcagtacggaagtgatctgatcagcataaccattgttgaacaggaagcggtcagtcacgatgagcgcacgtttgtggccatcagtaatcacttcatccagcgcgattggcagggagccacggcggaagtagatagatttcggaagtttgtgccacaacatgttttcagctcgcttagcaacggttttcttgttgatcaggtgtttcggaccaacgttttcagagatggagttaccaccccaagaaccacaacccagagtcagggaaggtgcgagtttgaagttatacaggtcaccgataccaccctgagacgctggggtgttaatcaggatacgcgccgttttcattttctgaccgaagtaagaaacgcgagccggttggttatcctggtcagtgtacaggcaagaggtatgaccgataccgcccatagcaaccagtttctctgctttttctaccgcgtcttcgaaatctttagcgcggtacattgccagagtcggggacagtttttcatgtgcgaacggttcgctttcatcaacaacggtcacttcaccgatcagaatcttggtgttttctggtacagagaagcctgccagttcagcaattttataggctggctgaccaacgatagccgcgttcagcgcaccgtttttcaggataacatcctgaacagctttcagctctttaccctgcaacagatagccgccgtgggttgcaaaacgttcacgtacagcgtcataaacagagtcaacaacaacaacagactgttcagaagcacagattacgccgttgtcgaaggttttggacatcagtacagatgcaactgcacgtttgatatcagcagtttcatcgataacaactggagtgttgcccgcgcctacaccgatagctggtttaccggagctgtatgcggctttaaccatgcccggaccaccagtcgcgaggatcaggttgatgtctgggtggtgcatcagtgcgttagacagttcaacagaaggttgatcgatccagccgatcagatctttcggagcaccggcagcgatagcagcctgcagaacgatatcagccgctttgttggtggcatcttttgcacgcgggtgcggggagaagataatggcgttacgggtcttcagactgatcagcgatttgaagatagcagttgaagtcgggttagtggtcggaacgataccgcaaataataccgattggttcagcgatagtgatggtaccaaaagtgtcgtcttcagacagaacaccacaggttttttcatctttataggcgttgtagatatattcagaagcaaagtggtttttgatcactttatcttcgacgatacccatgccggattcggcaacggccattttcgcgagtgggattcgagcatctgcagcagccagagcggcggcgcggaagattttgtctacttgctcttgagtgaaactggcatattcacgctgggctttttttacacgctctacgagtgcgttaagttcagcgacattagtaacagccataatgctctcctgataatgttaaacttttttagtaaatcatctgctcgaatacgagagtatagtcagtgcggtgatgatttgcttaacctatgaaaatcaaaagcttactcgcgctcacactcactgtgatttactaaaagagtttaaacattagagttattatctctaatgcgtcacttccaggtggcgtaagcaagattactcacttctgggtactgattacgtgatccaaatcaaatttttgcaaagctgacacctttcagcatcgcttttcgccattatagctaacagttaataaattgtagtatgatttggtggctacattagcatgttttgcacaactagataacaataacgaatgatagcaattttaagtagttaggaggtgaaaaatgctgtcaaaaggcgtattgtcagcgcgtcttttcaaccttatttatggctaacattatccggcttttgcttcggagctaaccgtgattcagaccttttttgattttcccgtttacttcaaatttttcatcgggttatttgcgctggtcaacccggtagggattattcccgtctttatcagcatgaccagttatcagacagcggcagcgcgaaacaaaactaaccttacagccaacctgtctgtggccattatcttgtggatctcgctttttctcggcgacacgattctacaactttttggtatatcaattgattcgttccgtatcgccgggggtatcctggtggtgacaatagcgatgtcgatgatcagcggcaagcttggcgaggataaacagaacaagcaagaaaaatcagaaaccgcggtacgtgaaagcattggtgtggtgccactggcgttgccgttgatggcggggccaggggcgatcagttctaccatcgtctggggtacgcgttatcacagcattagctatctgtttggtttctttgtggctattgcattgttcgctttatgttgttggggattgttccgcatggcaccgtggctggtacgggttttacgccagaccggcatcaacgtgattacgcgtattatggggctattgctgatggcattggggattgaatttatcgttactggtattaaggggattttccccggcctgcttaattaattcctttcaaatgaaacggagctgccatgctccgtttacttcgtcattatttttactttgttcccgcgcagttatcaaaagcaaaaggaataggtaaaaatattcttctcaaattacagttagttataaggatttccttaactgcttctcctcaccatcatgttattttcgccacatcataatcctgggcttgctgaagaataattgaaatgatattagtaattccactgcctttggtagaggaaagtgctaaataataatcaattgttaaattattgtgcatttcactactggaactgtaatcagaaaagatagacatgcttagccaatctctatttgattgaattgaaagatgtttgttaaggcatggatgcaagctatagattctgatacggtcaataaaagagaattgcttaacaattttgcaaaatgtattggcgagtaagaaccgcatttggtactttccgggcaaccgccagacgattctttattggtaatgagaataattaacaattaaagagcgtcgcgaaagaataatgtgtctcgacaggggagacacagtacgaatcgacataaggtgatcgtctgaatcaccagaataaataaagtcggtgatagtaatacgtaacgataaagtaacctgacagcagaaagtctccgagcctgtgcagggtcccaatccgggattacacatgctggttaataccagtaattataatgagggagtccaaaaaacaatgaccaacatcaccaagagaagtttagtagcagctggcgttctggctgcgctaatggcagggaatgtcgcgctggcagctgatgtacccgcaggcgtcacactggcggaaaaacaaacactggtacgtaacaatggttcagaagttcagtcattagatccgcacaaaattgaaggtgttccggagtctaatatcagccgagacctgtttgaaggcttactggtcagcgatcttgacggtcatccagcacctggcgtcgctgaatcctgggataataaagacgcgaaagtctggaccttccatttgcgtaaagatgcgaaatggtctgatggcacgccagtcacagcacaagactttgtgtatagctggcaacgttctgttgatccgaacactgcttctccgtatgccagttatctgcaatatgggcatatcgccggtattgatgaaattcttgaagggaaaaaaccgattaccgatctcggcgtgaaagctattgatgatcacacattagaagtcaccttaagtgaacccgttccgtacttctataaattacttgttcacccatcaacttcaccggtgccaaaagccgctatcgagaaattcggcgaaaaatggacccagcctggtaatatcgtcaccaacggtgcctataccttaaaagattgggtcgtaaacgaacgaatcgttcttgaacgcagcccgacctactggaacaacgcgaaaaccgttattaaccaggtaacctatttgcctattgcttctgaagttaccgatgtcaaccgctaccgtagtggtgaaatcgacatgacgtataacaacatgccgatcgaattgttccagaagctgaaaaaagagatcccggacgaagttcacgttgatccatacctgtgcacttactattacgaaattaacaaccagaaaccgccattcaacgatgtgcgtgtgcgtaccgcactgaaactaggtatggaccgcgatatcattgttaataaagtgaaagcgcagggcgacatgcccgcctatggttacactccaccgtatactgatggcgcaaaattgactcagccagaatggtttggctggagccaggaaaaacgtaacgaagaagcgaaaaaactgctggctgaagcgggttataccgcagacaaaccgttgaccatcaacctgttgtataacacctccgatctgcataaaaagctggcgattgctgcctcttcattgtggaagaaaaacattggtgtaaacgtcaaactggttaaccaggagtggaaaacgttcctcgacacccgtcaccagggtacttttgatgtggcccgtgcaggctggtgtgctgactacaacgaaccaacttccttcctgaacaccatgctttcgaacagctcgatgaataccgcgcattataagagcccggcctttgacagcattatggcggaaacgctgaaagtgactgacgaggcgcagcgcacagctctgtacactaaagcagaacaacagctggataaggattcggccattgttcctgtttattactacgtgaatgcgcgtctggtgaaaccgtgggttggtggctataccggcaaagatccgctggataatacctatacccggaatatgtacattgtgaagcactaatggcaatacgtggggcaggagtgtcctgctccacggtgtctgatttttatcgcattacagaaggcacaggccagaaggtagggcaatgttaaaatttattctacgtcgctgtctggaagcgattccgacgctatttattcttattactatttcgttctttatgatgcgcctcgcgccgggaagcccttttaccggcgaacgtactttaccgccagaagtgatggccaatatcgaagcgaaatatcatcttaatgatccgatcatgacacagtatttcagctacctgaaacaactggcgcacggtgatttcggtccatcgtttaaatataaagattattcggtcaatgacttggttgcatccagttttcccgtttctgccaaactgggagccgcagcatttttccttgcggtaatactgggtgttagtgctggcgttattgccgcattaaaacaaaacaccaaatgggactataccgtgatggggctggcaatgaccggggttgttatccccagttttgtggttgcaccattattagtcatgatatttgcgatcattttgcattggctgccgggcggtggctggaatggtggggcgcttaaattcatgatattgccgatggtggcgttgtcactcgcttatatcgccagtattgcgcgtattacccgtggctctatgattgaagtattacactccaattttattcgtactgcccgggcgaaagggttacctatgcggcggatcattttacgtcacgcattaaaacctgctctgttacccgtgctctcttatatgggccccgcatttgtcggcattattaccggttctatggttatcgaaaccatttatggtttgccggggattggacaactgttcgttaatggcgcattgaaccgtgactattccttagtgttaagcctgaccatcctggttggtgctttaaccattttgtttaatgccattgtcgatgtgctatatgcggttatcgacccgaaaatccgttactgatactggagctcgcgatgatgttaagtaagaaaaacagcgagacgctggaaaatttcagtgaaaagctggaggtcgaagggcgcagcttgtggcaggacgcacgtcgacgttttatgcataaccgtgcggcggttgccagtctgatagtgctggtgctgatcgcgttatttgtaatcctggcaccgatgctttcccagtttgcctatgacgatactgactgggcgatgatgtccagcgccccggatatggagtccggtcactactttggtactgactcatccggtcgcgacctgcttgtgcgcgttgcgattggcgggcgtatctcactcatggtcggtgttgctgcggcactggtggctgtggtcgtcgggacactttatggttcgctttccggttatctgggcggtaaagtggattcggtaatgatgcgtctgctggaaatcctcaactccttcccattcatgttcttcgtcattttgctggtgacctttttcggtcaaaacatcctgctgattttcgtggcgataggcatggtttcctggctggatatggctcgtattgtgcgtgggcaaaccctgagtctgaagcgcaaagagtttattgaggcggcacaagttggcggtgtatcgacatcgggcattgttattcgccacattgtgccgaatgtactcggtgtggtggtggtctacgcatcacttctggtgcccagcatgatcctctttgaatctttccttagcttcctggggttgggtacgcaagagccgttaagcagctggggtgcattgctgagtgatggcgcgaactcgatggaagtctctccatggttattgttgttcccagcgggattcctcgtggtgacgctgttttgtttcaactttatcggcgatggcttgcgtgatgccctcgacccgaaagatcgttaaggagtgcagccatgagcgtaattgaaactgcaactgtgccgctcgcacaacaacaggctgacgcactgctgaacgtgaaagatttgcgtgtcacctttagtaccccggacggcgacgtcacggcggtcaatgatttgaatttttccctacgtgccggagaaacgctgggtattgtaggtgagtctggttcgggtaaatcgcaaactgcatttgcgttgatgggcctgttggctgccaacggacgtattggcggatcggcaaccttcaatgggcgtgaaatcctcaatttgccagagcatgaactcaataaactgcgcgctgaacaaatctcaatgatttttcaggacccaatgacttcgttgaatccctatatgcgcgtcggtgagcagttgatggaagtgctgatgctgcataagaacatgagcaaagctgaggcgtttgaagagtcggtgcggatgctcgatgcggtaaaaatgccggaagcgcgtaaacgcatgaaaatgtacccgcacgaattttctggcggcatgcgtcagcgagtcatgattgcgatggccttgttatgtcgacctaagctgctgattgcggatgaaccaacaactgcgctggacgtcaccgtacaggcgcagatcatgacgctattaaatgaactgaagcgggaatttaataccgccatcattatgatcacccacgatcttggcgtggtggcggggatctgcgacaaagtgctggtaatgtacgccgggcgcacgatggaatatggcaacgcgcgcgatgtcttttatcaacccgttcatccttattctatcggtttgctcaacgcggtgccgcgtctcgatgcggaaggtgaaacaatgttgaccatcccgggtaatccgccaaacctgctgcgattaccgaaaggttgcccgttccagccacgttgtccgcatgcgatggaaatttgtagtagcgcaccgccgctggaagagtttacgcctggccgtctgcgtgcttgctttaaaccggtggaggaactgttatgaatgctgtaactgaaggaagaaaagtcctccttgaaatcgccgatcttaaagtgcactttgaaatcaaagatggcaaacagtggttctggcaaccgccgaaaacgctcaaagccgtcgatggtgtcactcttcgcctgtatgaaggggaaacattaggtgtggtaggggaatcgggatgcggtaagtccacctttgctcgcgccatcatcggtttggtcaaggcgaccgacggtcatgttgcctggttaggtaaagagttgctgggcatgaaacccgatgaatggcgtgccgttcgcagtgatattcagatgattttccaggatccgttggcatcgctaaacccgcgtatgaccatcggcgagatcatcgctgaaccactgcgtacttatcatccgaaaatgtcacgccaggaagttcgcgagcgcgtgaaggcgatgatgctgaaagtcgggttattgcctaacctgattaaccgctatccgcatgagttctctggtgggcagtgccagcgtatcgggattgcgcgtgctcttattcttgaaccgaagctgattatctgtgatgagccggtgtcggcgctggacgtgtcaattcaggcacaggtggtcaacctgctccagcaattgcaacgtgagatgggattgtcattaatttttatcgctcatgacctggccgtggtaaaacacatttccgatcgtgtgttggtgatgtatctcggccatgcggtagaactggggacctatgatgaggtctaccacaatccactacatccttacaccagggcattgatgtcggcagtccccatacctgatccggatctggagaagaacaaaaccatccagttactggaaggggaattaccgtcgccgatcaacccgccttccggttgtgttttccgtacccgttgcccgattgccggtccagagtgcgccaaaacacgtcctgttctggaggggagtttcagacacgccgtttcttgcctgaaagtcgatccgctttaaaaacaataagggctgacagttgtcagccctttttcacgctaaaagcgattatttattcccgccagatgatatggcaaagtttgtgatctttttcgcggcataacagaatgcgggcaaaaacatcgttgatttcaccatcttcactgtccgccagaccaatcaccacttcggcaaaaaagtccgggttcaaatcgaaatcaacatgttcctgccagtcttccgccggatcgaataactccgcgccgccgcgctcttcaaactgaagattgaacagcagaacatcagctggatcgagattgtcggcagccagttcgagaaaaatatcgtaggcctgttcaagcgtttcatcttcagtcaggcgattgtttagatccatatccatagttactacctgtttaacctctgttggcgacgttttacagcaacggactgaagaagtaaaacagtcgctcggcgacacgttgccataatggacgttttagccataaacgggcatcgagcagacgtgaacgcgaaatataatcgtcctgaacggcggcgaggtcagcaccaaaacctttatcgtcgattgccagggtaatctcgaaatttagccacagactacgcatatcaaggttaactgtgccaaccagacttagttcgccatcgaccagcacgctcttggtatgcagtaacccgccttcaaactgataaattttaaccccagcagccagcagttccgtaaagaatgcgcgactggcccagccgaccagcatcgagtcattttttcgcggaaggataatactgacatccaccccgcgctgcgccgccgtgcaaatcgcatgaagtaaatcatcgcttggcacaaagtagggcgtggtcatgatcaaatattcacgcgccgaataagccgcagtcaataatgcctggtgaatgagatcttccggaaagccggggccagaagcaattgtgtgaatggtgtgaccgctggcctgttcaaacggcataatattgacatctggtggtggcggcagaatacgttttccggtttcaatctcccagtcgcaggaataaataatccccatcgcggtggcgatagggccttccatacgcgccatcagatcaatccattgccctacgcccgcatcttgtttgaagtagcgaggatcgaccatattcatgctgccggtgtacgcgatgtaattatcgatcatgatcatcttgcgatgttggcgcaggtccatacggcgtaaaaacacacgcatcagattgacctttaaggcttcgaccacttcaataccggcattacgcattagctcgggccacgggctgcggaaaaaagccacactcccggcggagtcgagcatcaatcggcaatgaatgccgcgtcgcgcagccgccattaatgattcagccacctggtccgccatgccgccgggctgccagatataaaacaccatctcaatattatggcgcgcgagctggatgtcgcggattaacgcctgcatcacatcatctgactcggtcatcagttgtagctgattccctttgaccccagcgatcccctgacgacgctcgcaaagcttgaataatggcgcagcgacactgctattttcttcggcgaagatatgcttacaggctttaaggtcgttaagccattttgcggtggaaggccacatcgctctggcgcgctcagcgcggcgtttgcctaaatggagctcgccaacggcaagataggcaataattccgactaacggcagaatgtaaataatcaacagccaggccatcgcggagggaactgcgcgtcgtttcattagaatgcgtaaagttacgcctgcaatgagcaaccagtatcccagaatggccaaccaactcaccaacgtataaacggttgtcatagattagaaatccttttgaaagcgcattgttatgagtttacgcatatggattcatctggcaaataaaaacgcgggaaaagcactggtcagcgtcgggggtgggggtataatgaccattctgttattgcatagagtagttaacatgaagcggagtagaacggaagtggggcgctggcgcatgcagcgtcaggctagccgacgtaaatcgcgttggcttgaggggcaatcgcgccgaaatatgcgtatccacagcatcaggaagtgcattctaaacaaacagcgtaactcgttattgtttgcgatctacaatatctaaatgtactgggcaccattgcggtgcccaataagtttactcttccgtctttaaactctatttttgcgccgattctttactgtcagctttcgtttctagttcatcgttatcgctgaaaataccatgacctgagttcaacaacattgaaacgagcatatcattattaatctcttcaccatttaaaactcgcgccagaatttcgctgccaaacagttgcggtgagagaatgatatccggatgtaccatcttaatcttattcaggtttttgctatcactgacggcgagaactgttttgacatcactgctcatatcttttgccgagagtacaacaaacgcgttatctgcatcgttatcactcagcgccagaatggcccggcaacgatcgattcccgctttctttaatacagaactgtcattactgtcaccggggataacatcagcattatcgcctaagcgttgctcaagttgcttgatatcatcttcaggcaagttgctgataaccgttacgttttgtccgcgttgattcagttgcaggatcgtattgatggcgagaatcgaatgtccgcaaacaataaaatgatctttacgatgcattgtatgattgtttccttttacaagtttgttgaatcccccgcggataagcggaccaaaaattgaggtcatagatgtggcaaaaacggtaatgccggaaataatgaccgaaatagtgaacaatcgtgctgattcagaaacagggacaatatcgccatagccgacggttgacatggtttctatcgaaaaatagaacgcggtcatcaaactttctattcgcggattaaaaccttcgcttaaataaagcgcaccgtaggttgagtaaaacagtaatgtcgtgaaactaataaatgcaaaaattgtcccggctgcggcgctactgtgggagaagtctttgcgcagtatcagcaaaaacaccagcgtaaaaatgcaaaatccaatactaaatttcagccagggataaaaatgcagggtgtaaattagcgctatcaacaacaaaatgatactgattgcccatgcgagctttgcccggaacagtaagccaatggagttcaggacaagaaagacgccgagcataaagagtggggcgtttgccagcaaggagagatccaactctgaaaatgctttgatatggaaaatatcaagcaaattgaccgacataccatagattgttttaaaaataagcaatccatttaaaaagacggccagcgcgagaatgtcgtgccgaagggtcacccataaatttgttgctgtttgtttgaatgtagcccagtgactcactgatacctctgtaaccacaattttgtttaattatcttagcgtgcacattttctgaacatacatgcagcgcgtgaatgtgttaaacaatagtagatgactttatccgcagtaatcaaaggatttgagcgagcaactgtacctcaggaaaggtcatttttcctgaatatgctcacatcatataaagaaatacagataaagttattatctgcttgtggtggtgaatgcactgaccggctataaggaaaggccaaacaagaacacggttgcaaaaaccgtgcccttaaatattgaatctctattcagaacactttcttaaatggtttcactgaaacgtgttcatagactcctgccgctacgtacgggtcagcatcggcccaggcctgagctgcttccagcgattcaaattcagcaataacggttgagccagtaaatcccgcagcccctggatcgttactgtctaccgctggcattggaccagctgtcaacaaacgaccttcatcatgcagtaactgtaaacgtgctaaatgtgccagacgaacggaaaggcgtttttcgaggctatcagctttgtcttgagcgtaaataacatacaacacgggcacaactccttgttcgggaaagttgtaaagtacgttatttgaaagggcgaagatctgcaacggaaagatgatgtctttgttaaggccatgcataaagtaagggtaattacgccaaaaatgacattttcactgatcctgatcgtcttgccttattgaatatgattgctatttgcatttaaaatcgagacctggtttttctactgaaatgattatgacttcaatgacccttgatttacctcgccgcttcccctggccgacgttactttcggtctgcattcatggtgctgttgtggcgggtctgctctatacctcggtacatcaggttattgaactacctgcgcctgcgcagccgatttctgtcacgatggttacgcctgctgatctcgaaccgccacaagccgttcagccgccaccggagccggtggtagagccagaaccggaacctgagccgatccccgaaccgccaaaagaagcaccggtggtcattgaaaagccgaagccgaaacctaagccaaaaccgaagccggtgaaaaaggtacaggagcagccaaaacgcgatgtcaaacccgtagagtcgcgtccggcatcaccgtttgaaaatacggcaccggcacgcctgacatcaagtacagcaacggctgcaaccagcaagccggttaccagtgtggcttcaggaccacgcgcattaagccgtaatcagccgcagtatccggcacgagcacaggcattgcgcattgaagggcaggttaaagttaaatttgacgttacgccggatggtcgcgtggataacgtacaaatcctctcagccaagcctgcgaacatgtttgagcgtgaggtgaaaaatgcgatgcgcagatggcgttatgagccgggtaagccaggcagtgggattgtggtgaatatcctgtttaaaattaacggcaccaccgaaattcagtaagcagaaagtcaaaagcctccgaccggaggcttttgactattactcaacaggtaaggcgcgaggttttccttcaggatcaaccgcgacatacttaaataatgcttctgtcgctttatagcgttgcccaattggttcagacgctacttttttcacccacacttcaatattaatgctgaccgatgtcgtccctttctggacacagcgtgcatagcagcacaccacatcgccgaccgcaaccggccgtaagaaagtcattccttcaacccgcacagtcactacgcgaccgtgggcaatttcttttgccagaatagcgccgccaatatccatttgtgacattaaccaaccaccaaagatgtcaccattggcattggtatcggcgggcatggctaaagtacgtaaaacaagatcgccctgagggacgttatgtgttgtagacatggtaaaaccgacttaaaaggaaaatcacaggcgcgatgctactatgattttcctgaggagaacagaggagatacagcgccagccccgaaggactggcagtctggttaggatttatcttcctgcggcatgtggcggtagatatagataccgcttaacaatgtgaagattaaggtaagggcggtcaggccaaagactttaaagttgacccaaatattttgcggcagccagaatgcgatgtagatgtttgccagaccgcaaaggataaagaaaacagcccaggccagattcagcttcgaccataccggttgcggcagcgtgagttctttacccagcatccgctgaattagcggctttttcatcacccattggctgactaacagggctcccgcaaatagagcataaatgactgtaaccttccatttaataaactcatcattgtggaagaacagcgtcaagccaccgaagacgaccaccagaacaaaagtgatcagggccatcttctcaaccttacgaaagcgaacccagctatagataagcacaatcgccgtggcgacgatcagcgccgcagtagccgcatagatgtcataaatcttgtaaaacgcgaaaaagacaaccagcggtaaaaaatcaagaaactgcttcattttacgattccgtaatcaaatgcttaaggttattggcgaatcaacatatacaggcggaacagatagatgagcaatatggctgaaatcaggttgctcaaggtgttcgccagtacggcaccaatttccggggttaatgcggcaaaagaagaggcaaaaagcagcaacagtgtttttgccagcaaccagctcagtactgcgggtgccaccagacgcatattcgcccaagtcagccgcatactgctacgcatcgaggcaaaaacgcccattttgtcctgtaccaacatcaccggtgccagggccagtaaaatggccatgataattcccggaacgaccaccagcatgatgccaatctgtactaaaagggtagtcagaaaaatcagaataaataactttggcaatatcggcgcactggcaccaatagctcgcagcgcactgactctctgacccgcagacaccagctggataattaatattacgcctccggcgagaatggcgttaccgattaatcctgaaaaagtggacgccgctgaagcctgcagcaaaatttgttgctgttccggtgacatattctgaaccaggtcgaacaacccactactgccgctaacgggcacgccgtcattgagctgcgcaagctgtgcatcactgggtgagaaaacatgccctaacaccactgtgataaacgcacatagcaacgataccaacagaatggtcataaattgattacggaagaaatttccggtgtcacggtatacggactgcgccgtgatagacatgcactctccttgagttttatgcaggtgttaattagcgggcaattgtaccctggttaagcctcgggtggcagcatcaggtcttgtatggaaaagcatatctttgtaaagcggaggtaattgctggccttcaggcatgggcaaatcgcggcaagtggcgaccgagttaatatttgcgtagcgaaaatatttaaaaattgatttaaatcacattaaccaggattctcaatgcaacttctaaattaatccagatcaataaagggtgaattatcatatgtaatgtgatctatgtaggatcatttgttactccaatgtaggtatattcgtcacgtttttataaccataacgacggagcggatatgaaaaagttaacagtggcggctttggcagtaacaactcttctctctggcagtgcctttgcgcatgaagcaggcgaattttttatgcgtgcaggttctgcaaccgtacgtccaacagaaggtgctggtggtacgttaggaagtctgggtggattcagcgtgaccaataacacgcaactgggccttacgtttacttatatggcgaccgacaacattggtgtggaattactggcagcgacgccgttccgccataaaatcggcacccgggcgaccggcgatattgcaaccgttcatcatctgccaccaacactgatggcgcagtggtattttggtgatgccagcagcaaattccgtccttacgttggggcaggtattaactacaccaccttctttgataatggatttaacgatcatggcaaagaggcagggctttccgatctcagtctgaaagattcctggggagctgccgggcaggtggggggtgattatctgattaaccgtgactggttggttaacatgtcagtgtggtacatggatatcgataccaccgccagctataaatttaatggaacccccgtgaaagacgcggtacgactggatccttgggtgtttatgttctctgccggataccgcttctaattttctctgcaaaacctctgcaaaactcttctgcaaaactggttatcaaataaccagttttttccactccttaccgcgtgcgtcgttgtaaatatcggtcattttttgattcgaatgacccagcaaaatttgggtatcaattccctgttctctgaacaatctttctgataaagatctctgctcatggaaagagggtggggtgccattagcacgccagttgtaatccacagaatcccgcgcttttttaaatgcaacggttaacgttgctggtttaaccatcccgccgcgcttagctgtccctttcgcgtgatggtggtgcaatagccacgggctaagaacgcaatcgcgacaggatgacaccacatcatccagagtgagatttaatttatcgcagcgcagagccagagggatggcaatccgggctcctgttttttgctgttcgacatgaagataaccatcccggatatccgaaaattgcattttgcaaatatctgaaaggcgctggcctgtcatcagtgccagcagcataccgcgctgtaaaaagtaaccatccttttccgctgcgttataaatcatcacccactcatcaaaagtcagtcgctgtcttgatatccgcacctgtggtttttttgccgattctgcagggttaaagcctggcgggacatcgcctgtttgctgagcttcccggaaaacatcgatcagtaccttcctgaaaatttgtcccattctgttatgtcctctggtcttgtactcttccagcaccgataccacatcctttacggttatggcatctaacggtctggtgccaaaacgttcatcaaatactctgagaggggccgctttttgtttcagcgtgttgagtttgatttctccgttttcatatctttcctgttgaatttttctgtaattattcagaaaactggaaacagttgatgaaccgccggtatctctaataattttctcctgcagactgagcatttgttccatttgctgcctggcaagacggctgttcgcttctgctgcaatagtttctgccagtttctggtcaatactgccgagaccgtgatttttgcctgttatgggatgcctgtaacgccagtaaaccttgttatttcttttgtcaaaatatggagacaatcccggaacatcggttttatattttcgcgggcgcgccatcttccagtatcctcttcaaagcagggtgatctgtggcgatcacctccggcttgtttaccattccgacaaagcgagctcgcggatccactcgccagtgtcttccaacttttttggggagaggaaatatcattccggctttagcgtatttacttaacgtgcctggagtagggaccggatcgctgaattcctcttttgcccactcagtgagcagaataagtcttgccatgagcgtcgttcgctaatcatggtcgccgccactatagctggtgggcgacgaccggggttgaacattaaaaatcagcctgactcgggatcagtttttgccagattgctgaaacttgttttgcctggtgacgtgcatcatcaagtgcattgtggggtacaccttcgaatggaatagccattctgacatcaaagccaatggaatttcccagttcaacaattgtgcgcacatcgcgatcgttgtagtaacgccacgggcaggggatcccctgccgttcatatgaacggcgtaaaatcacattgtcgaagttggctccatttccccagatctggacaaagctttcgccggagttttcgttgataaattcccgtaattgcagtagagcgtcatctaacgggatttcatcggtaaaaatggcagattgcgcttcgcgtgatcgcttcgcccaccactttattgttttccggtcgatgattccgccagatgtttccagatcgatagctttgctgaattccggccccatctctccggttgccgggtcaaagaatttaccgccaatagagttgattggtgcatcaggatttgttcccatcgtttcaaggtcgaccgacaggtgagtccacactctgctggtggatgtgataacgtgatgaccgttcaccgcaattaagggatctgccgtctcgccagtttcattatcgctggcgtggtcctgagcgctgccagcattctccttgtgtggatgttcagcgccttccatttcctccggatcattttcctgaacttcaacctgattctcttcatcgaatgtttcctggtatgttgcgttgcccatcaccgcaccacaatcagggcagttgccgccgccggtctgaccgcaggcggtgcagactttttccgctttctggtcgttctgttccgtttcttgctggttctgattcactgaatcgcgggtttcaatccccttcacccatttcggatcattcgggtcgctaatccctgcaacaaattcaccacgtgatacagcaagcaacttatcggcgtcaggctggctgatattggctgcctgcataattttgtttacttcgtcagcggtaacttttaccggctctggttgtgcgatcgtgtcagatgcaccagtattttgttgtgaacctgagtacgtgccgtttttacgtgcgaagtattcctcttttgtgatttccgtagctcccagggccagtgctttttccagaccagaaagtttgtttgcgcgactgtatttttcgccgtccttatcggtgaaaaggaagtagaacggtccctcacgctctacagatggttcgtcttccacttcgcattcggttttttcgttgtccggcattgccgtttccactgcatcagtttctggtactggcgacgggagagtgccagctgtgccctgatttgttccttcgtcatcttcaaacacgcccttggtagtcaggtattcagtgatgtatttgttcagtgctacgggatctttgtgaatgtcgatcggacgctcacggacaaggccaaaaatagtctgacggtcgtagcgaacggcatcgggttgtttgcgcattgatgcggaaatgcgcttccagtcttcgcgatctttgtcgataacttcattttttgcccagcgatggatgctgccgtcaatgtttccggcattaatatcgccaggccacagagcgtaggccagttcttcatccagcgttttccatgtctgcttgtattcgcgacgaatggctgcagtggtggggttgatttttcctgctgagttttcagtgttctgccggttaactttggcgcgggcgagatcaacaacagaagtatatgcaccaccttctttgcgctccttttcctggcgttttttacggtcgagaaaatatgcctgaacgtcgggccatttggcggttggttttaaatcacgtctggcatcgttgatgtattcaatctgacgttccggatacatggcgttaatttctttagtccggataattgcctctgcgaggtgtccgtcaaaggtcatcatgtcgtcatcgccaagaagaccgcttgcgttgatgaccatatccacggtgacgttttcatgtgcgccaaacttaacgagaacagcggcctgtttgtcgtcggataactgattaaagttaacaatttctgtattcggctctggttcgaccgggacaaaggaagacgatccctcatcccagcggttttcctgcatatactcggtatcccaggagtcgatagcagggcggggcatgccgggtttatcctcgcagacaagaaatttataagcgcagtcctgagcagccggatattgctccaggaattgccaggtaaatttggcacgggcgcggcgttcgtcaccggcttcaatggcagtggctacagcaactgccccttcttcctttattgcctgttcgtccggaatggcggcgcaaataaagactttactcattttgttttaacctcattaaagatttaatggtgaacaaatccctgccattgctggcatatataaaaagaatctgatttttgaattaccgcactcaggattttgaggcaggtgtttcagtaaaattctggtgtataattttttctaccggataacagttaccgggaattttctgttctttcattgcggcaatgcattcctccttgctgtcataaatacccgttaccatatcaaccggttcgctgttagccataaaaacaagcatgactgaggcccacattacacccatgattttttctcctggaaaatgtcaagtttaaggagggcgagtcgggaaagcatggaattatcattgagaagataaggttcatatttcctcatattaatggcatcctcagtgaagtctttattactgagctgaatgccaatatcaaaacaaccttcagatgtattaacgtttggtaataacgtttccattatcgcgccctcaacaatgaattttgtgatgcggtgcctggtgcctccaggtgacgttaaccagttaacaattaacgccggatacagagaacccacccataagaaccaatacggaagtcaactggcctttttaactgttccgcgtgcgctgagccgcattcaccgcatcacaaaattcactttaaaaagggcggacatcagccagcaatgaaactgatgccgccaaaaggtaatctacatgggttgttgcagcggggggggcactcaggcgtatggtcaacctgacaacccggtgttatctcgaggaaaggatagcctcgccatacttaccgccgcgccatttcgcggagtgccacaaccagaagcgcacggtcgaattaaatttaacgacaggctatctatgaaccatcaacctcgccgtgcgctttcgcgttatgccctgacttttcagggatatatcctttcagtaaactgtcagtgccggattcttatccgtgtccggcgcacgaccacacgtgacagcgtgttgatctccatttttaaccgcatcccaatggaggataaaatgccaacaaaactatgcccagtctgtaattcttcgtctgatttttcagagaagaatggttattatatttttgattgcccgaaacacggtgtattccatatatcaaaacttgatgggatatttgtgaaaccaagtcagtatcaggctgacaagttaaataaaattctcaatgccaaaagagcgtcaggctatacggaacctatagaggttttaccgcgtcctcgtcttgtggaactggattaaaccagtgctcctgaatcgctcgtatttttaccctcggatgattgccgggggtgattattaattctggcggacatggttctccattatgacaaattgcgctataagtgaaatcagccagagcagtgccggtcattattattccgaacttatcaagcagcgagagcaactcacgcaaacaggagttatcagttttttcgttataaaatgaatcccctgatgcagagagcatttcacctcgctctgcgatgcgtttggccattttccagaattctttttttgaatacttttcctcgacatgaaaacccatcgccgaggcaatccgctttgcagcttcttcagtatcctggttgtttgttaccgaaacagagtacaatccggtaaacgcatcgcgcacattacgagccatattatcagtgtcttttttcgttaccgattccaatgcaagttcgttcaggtgttgacggagtgtctgtgctgcaatctcctggattgatagtggtaaatctttaaattccatctttaaccccgttagccgttagattttatcgaactggaaagcgcctgtttaaactcactgaagctgagagcttcttcgccttcggcaaggccttcgaagtattcttcgtaagccttttccatgattgcgtcgaaatccatattactcacctgaatttctttccagccagcgatgcgcgccagattcggttttaaacgttttgcttttggtatacgtcatcgcggtgaatgtgccgtcctggttggggaacacgccacataccagagattcgctgttgccaagatcgatagtatccatgctgacctcatttccccttaacgccggggtggcggaactgtttgctgagaacaccgtgcggtgtgttgatgtaaacaagattagccatggctaacatattggtcaagtgattttgtatgttatggctaacataattgatataataaaagataactcattgatgatgttatcttttatttgtccgctgacgggcttttagtaattcttcaaagagtttattgaaattttttactcgagctcgcatttcggcgagctgggtatcctgttctgattctggcagtgcattaaacagctcaaggagctctagttctttgggggctaaggcaaccggcttctcaacaggtggtgttggttgcttgtcttcatcgccaaatagaatccatgttggtgagcattgcaatactttgctgagggcaaaaaggttcttccctgtaggttcactatcatcccgttcccattgtgatacagacacatgggagattttcagggctttagcaagagacctttgggtgtgtttgaggtttttccgacgatacctaatgcgttcgccgatggttaaattttttgtatccatagttagctaatgctaaatcgtattgactatgtttttgttaacatctattttgttagccatggctaacagctaaggtgttttaaatgcttaaaactgacgctcttttgtatttcggttcaaaaacaaaacttgcacaagcagcaggtattcgtttggcttcgctttatagctggaaaggggatttagttcccgaaggtcgcgcgatgcgtctacaggaggcatctggcggggagcttcagtatgatcccaaagtttatgacgaatatcgtaagacgaagcgggcggggcggttgaacaatgaaaatcactcctgaacaggctcgtgaggctctggatgcctggatatgtcgaccaggaatgacacaggagcaggcgacgatattaatcactgaagcattctgggctttgaaagagcgcccgaacatcgatgttcagcgtgtcacatatgaaggtggcgcggttgatcagcgagcgcttagcgttaatcgagtgaagatatttgaacgctggaaggctatcgacaccagggataagcgtgaaaagttcacagcgctagtgcctgcaattatggaggctatccggattagtgatttcaggttgtatcgtgaaattagtgacggaaagagcattacgtacatgatcgctgggttaaataaagaatatggcgatgtggtggagtccggactgctttttgcagatcctgccgttgtagatcgtgaaactgacgaacttatagaaaaagcaattgctttcaagcttgcgtatcgacagcaataccaacaaaaagctggatggaattatgagccttctttttgctgaacgcccactggttataaacacacagcttgcgatgaagattggcttaaacgaagccattgtgttgcagcaactgcattactggttgagagataccaattccggcatggaatgtgatggtgttcgctggatttacaacacaacggaacaatggctggcgcagttcccgttctggtcagagtcaacgttaaagcgcgcgtttgcaagtctgaaaacgctggggcttttgcgttgcgaaaagctcaataaatcaaagcgcgacatgaccaatttctacacgatcaactacgggagcgatcttttagatggtggcaaattgagcgaatccatcagttcaaaatgcgtcgctccatcaggtcaaaatgacatgatggaagaggtcaaaatgaaacgctccattggttcaaaacgacccaatgtcatcgggtcaaaatggcccgatgatcctacagagaatacaacagagattactacagagaataaaaacacttttcgtccggaagctttgcaaccggaccagcagacggctgaacaggattttttaatccggcaccctgacgcagttgtgtttagtgcgaaaaaacggcagtggggtagccaggaggatttggcgtgtgcgcagtggatctgggggcggatcgtgggtctctacgaacaggccgccagtgatgatggcgagatcatgcgaccaaaagagcctaactggactgcctgggccaatgacgtgcgcacaatgcggatgctggatggcagaagccacagacaaatttgcgaaatgtttggtcgggtacagcgagatccattctgggtcaaaaacatcatgagtccgtcaaagcttcgcgaaaaatgggatgagctggttattcgcctggggcgttcgccaataaagcgttgtgtgaatcatatttctgaaccggataccgaaattccgcctggtttcaggggataagtgttgatttcaggtcatgaggtaattttaagggggacttgtggcaaaagtttttacacaagaagagcgggaaaaaattaaagggcaggtggtggaactcgtgcgccagagcggtcgtgagacgctacggcaactggaagctaaaacaggtgcgacaagatatctgatgagcattcttgccagagagctggttgccagtggtgatgtatatcactctggctatgggttgttcccgtcagaacaggctcgtaaggactggcaaaacgcccgcaaaaaactctcgagggcaaaggtgaagaaacctgttgtggttgatccgggccttatctggacattacccgacggagaaatacgccgctacgacaggcgtatgaacataatctgtcgcgagtgccggaagagcgaagttatgcagcgtgtattggcgttctatcagggatatgcctagaattgtcacaggtaatgaaattaaagagtattggttcggatatgaattgacattttcgcggcacagagctaaaaatagcctacttgttggttttgtgtgaaaagcagacattttgaggctcaggatttgttatcaaataagaccaatacttatctatattaatacacattaaatactgtgcaatacattattgcattttattagataagcgatatttagggaaaagaaaagtcatagaaaacaggccgctatttgttgttggattttataggctatatctagattatcttgccactgcggtctctgtttacctaacagcttgggcttctttgcatgcaagtttgtaataacgagtgtaatcaaacggaatgtctattaatcctaaacttaagcgtgtcgcgctacgctatccagcgttattccaaaatgagtccccctatatggcaagaaaattaataatattcggcaacggtctcggtatggctttagatcctgctcacttctccttagacagagcgttggaagaaatttggcatcgccccaattttttaaaagatatccacaagcaacttatcgagcgttgtcttcagcggcaaggtccaccagaaggagaacatgagttggatacccttcaccaggctgtcacatattgtaaagctcttgctcaaattggagaggggaacgtgcattggcttactgaagatggactaaacttccccaaaattaccgccacttatattcacaaagttgcaaccaggttgcataattacgataaaggtttgccacaaagattcgaaaatgcgcttgtggagtttgtaaagaacacacactcacatatcgcgacattaaactatgacaaattattatacaattcattcatagataatgatatattcaacgggtatgatggggttttagttgatgggatgctaagccacggattttcctctgcagcgctcgaacggaaatacaatcgtaggtttggttattatttgcacttgcatggttcaccactatttattaatcagcatgaaaatgttttaaaactttcacgctcacaacttactcttgacatagatgaacctagtgagcatatagtgttaactcatataaaaagaaaaccgtcagttatagcagcatctaatgttctttctacgtactgggattatttgcagtttgcattatttgaatcagaagaaataatattgtttggttactcgggtctcgatattcaccttaacctgcttattcgaccttacctaacctctaagcctttaagagtaattgagtggagcggtgctggtgaacaaaacgctcgtgagatatattggaaaaacctgttgggacgggaagttaatgtaattaggttggataacatcactgattttattgattggtagcgcaatgcgaagttaaagaggcagcctcatatttatcagagctggtgtacgtccaatacaggaggttatcgtgctggttctcaaatgcgcgctggctattgcggctgtagtggcaatttattgtcttgctattgttcttatggatcgcctttctgattgattttatattggcgaggtgacgggagttaagtagaattgctgcgggtgcttgaggctatctgcctcaggcatgaacaccaaaaggcagatagagaaaagccccagttaacattacgcgtcctgcaagacgcttaacattaatctgaggctcaatctatgaacggcaaatctaggttagcctcttacgtgccgaaaggcaaggagatgtatgggtccaccacatattgcaatttttgttctcacttaaaatatattccacgggcgtcattagtgcgagcgccttatggggccttttgctgttatacagcaccagatattcccccagcttctgattaaatagcgccagatcttcaaagagtaaaatctcattaaattcaataaactgctctcttaacgtccggttaaaacgttcacagatagcgttcattttgggtgtgtagggataggtccagaggtgtttgatagcggcttcctgcagcgttttgtcgaagtttcccaggaactcttttccgttatctgtgattatctggctgataccgaccgggaacagccgggctgcacggctgaagaagtgattgacgatatcactgttgagcgacggtacagccagcgccagcgcgtaattgctgcattcgtcgatcatggtgatgacatagcgacgcagttcgcccattctgagctcaatggcgtccatcccaatgagctcacctgtctttaccgggcggtagtgctttggtctgcggggtttggcagaccgctttttgacaagcagtgccttcccccgcgagcccagacgcacaggtatcattcgcattttatcgtgtgcggcagcgatcattctgccaatgctggaaacacttggacaggccagatagcgctgttcgcaccagggcttcaggcgaacaaaaatctgctctttaccgaggttcggcagctctgttcgcagccgtcgaatctctttcagcacatcgggatgccagtgcttttttcgtcgcaccagaggtgccttactgtgcgggattagcccctcaggtcctcccttgttcagtaactgacgccaccagtaaagcgtgcggcaggacacgccaaaggcttcagaagctgcagaaataccgtgtttatcccagaagtgcagagccttcattctcattgttgctgtatcagccatcactgaaagcctcaacgcataatcggccgtttggtagtacttaggatagccaaccatcagatgctgcatttgcatagtgcaatctccccttacttatccggaggtaattgcaatatctctgtgaacttacacaggagaagcaggctatgaagcagcaaaaggcgatgttaatcgccctgatcgtcatctgtttaaccgtcatagtgacggcactggtaacgaggaaagacctctgcgaggtacgaatccgaaccggccagacggaggtcgctgtcttcacagcttacgaacctgaggagtaagagacctggcgggggagaaatccctcgccacctctgatgtgtcaggcatcctcaacgcacccgcacttaacccgcttcggcgggttttttattgcgtagcgtagttgattagctttttgtgtaccccgttggttgtggttcttgaggggccgttaggggtaaatagaatcatattacttagttagcgcgcagggagaagagggatggaccccaaacaggggaaagttatttatccagaaggattctgctgatgaaaatcgaagaattacgtgaaatttttagtgaagatggcctctatactgtgcgcgttgagaatggcgctattgtcagccactgccgtattaaatgtttacagtctcaacaaaggaagagtggagctgcgttaattcattttgtggatgggcttgtgacggatggttttattttgcgtgcaaatgaatttgtcacatcgttgccgtctctgaaagaagctgggattaaggctggtttttctgcttttgaagatgagtgaattcatctacaattcagcgcagggctgaacccctgttgagtaacactgtgccaccggagaaagccgatggcgcaaaattccagactacacaattctgataattcagccgtctttgccagcaggcacgggcggcgctctcacgcatttaaatctgattggtaccagcatcccccatgtactgaagaacaggctgaatggctgattcagtgttaccgcaggcgcggatgcgaggttaaaaaagcccttagcctcgactaccgtcactggataatctccgtcaggcttccttactccgaacgcccaccgcgtccgtcccgcacattccagcaacgcatctggaggtaacgtgcgggtattacttcgacctgttctggtaccggaactcgggctggtgatcgttaagccgggccgtgaatccatgccggtattccacaatacccgggtactggtggagccggaaccgaaaagcatgcgtaatctgccgtccggggtcgttcctgccgttcgccagccgctggcggaggataaatcattactgccatttttcagcgacaaacgagtgattcgtgctgctggtggcgctggcgcattgtctgactggttactgcgccatgttaaatcctgccagtggccacacggcgattatcaccacagtgaaaccgtcattcaccgttatggtaccggcgcaatggtgttgtgctggcactgcgacaaccagctgcgcgaccagacctccgaatcactcgggcaacttgctcaccaaaacctgtctgcatggatgattgacgtcatacgccatgcaatgaatggcacgcaggaacgggaattatcgctggctgaattatcctggtgggcggtctgtaatcaggtggtggatgcactacctgaggttgtatcgcgccgttcgctgggattaccagcggaaaaaatccgctcggtttaccgcgaaagcgacatcgtaccgggagagcagaccgccaccagcatactgaagcagcgcacaaaaaatcttgcgccgctgcctcacgcccaccagcaaaacccaccacaggaaaagacggtggtaagcatcgccgttgatccggaggcaccggctcagtatctccagcgccagaaaccacaacgggaagagatgcctgtatacacgcgctgggtaaaaacgcagaaatgcatgacgtgcggtaatcaggcagatgatccgcatcacatcattggtcatggcctgggaggtatgggaacaaaggctgatgatttgtttgttattccgctgtgccgtaaatgtcataacgaactgcacgccggggtaaaagattttgaagaaaaacacggcagccagctgttgttgctgattcgttttttaatgcacgcgagaaattcgggtgtcctgaagtggaaagcatgaatgactgaacgcatagaatttgttttgccttacccgccaacggtgaacacctactggcgtcgtcgtggcagcacatattttgtatcaaaagccggtgagcgttatcgccgtgatgtggcgctcattgttcgccagcagcggctgaaattaaacctgtccggaaggctggcgataaagatcattgcagagccgccggataagcgccgtcgtgacctggacaatattctgaaagcaccactggatgcactgacacatgcggggttgcttatcgacgacgagcagtttgatgaaatcaatattgtgcgcggtcaggtcgttcctggtgggcgactgggcgtgaagatttacgaaatcagaggtaataacgatggcgcgtgatattcagatggttctggagcgatggggggcgtgggtggcaaataaccacgaggatgttacatggtcatctattgctgcaggttttaaagggttaataccgtcgaaggtgaaatcacgtccccaatgttccgacgatgacgcaatgatcatttgtgggtgcatggcccggctgaataagaataacaaagatcagcatgatctactggtggattattacgttgggggaatgacgtttatggcgctggcacgtaaacacgggtgttctgatacgtgtattggtaaacgtctacaaaaagcagaaggggtaattgatggtatgttgatgatgctgaatgtctcactggagatggattgggctgtgtcggtttgatttatgtcattttttacagcggcgcaatggagagaatagcaaaagtttttggtaatacagtaaacaggatggatatgttcaaaaaatcattactcttaacattggtgatgtgtttgcttttttcttcttttgcggacgcaaaacggagacataaaagatcatctcatcgttcgcagcatcatcactattatagggataacagcgcaagtaagcaggaagtttgctcggagggatatgttgattattttggagtgtgcaagggcaaagagataaaacaggacgaagattcaaaaccagcaattcaaaagaaaaaaataaataaggcgagcaaaaaaagcaccaaatgtaaaaaatagccaaccagacctgcgagagaggacagcgtttcaacagaaaaaaaatgtaccgacttgtgcgccgctgaatatggcgcataaaccgggatatacgaatttgcctatatgtgtggacggagaatactaagtagcataaagatgtttacgatcgtaaaaatccggatatcctgttaagagtggttacttcgccacacagcttaaacccgtcgcctggcgggttttttatacctgaaaaacggcacaggacgttaaacgcgctggtggttgcgaataccggtctttcagcttgctggctttttcgacaagagttattggtatgtcatgttaaccagaaaaggaaaaagacatgctaaaacagcaggatatgaccgaaaccgccagagtggtgtttaatgaattaagcgtcaccgaaccggcgaccgtcggggaaattgcgcagaatacttacctttcacgcgaacgctgccagttaatactgactcagcttgttatggcgggtctggcagattatcagttcggttgttacagacgccttccgcagtgaaggctttttaatttgtggtaatgggcggctagtgggtgttagcggcacctgccagccatctgctcatgcgttggggtcacaagcaaacctcaggcccatctgctttgcgcaaaagcggtatgagcctatcagagaagtgcttattgatctatggctgatactgtaaaaatatccagttgcgagttaatcaacgctgattgcctggaatttatccagaccttaccggaaaactctgtcgatctgatagtcacagacccgccatactttaaagtgaagcccgagggctgggataaccagtggatgattacctgaaatggctggaccagtgtctggcacaattctggcgtgtattaaagcccaccggaagtctttacctgttctgtggtcatcgcctggcgtctgatatcgaaatcatgatgcgtaaacgctttaatgtgctgaaccatattatctgggcgaagccgtccggacgctggaatggctgcaacaaggaaagcctgcgggcgtatttcccggcaacagagcgcattctgtttgccgaacattatcaggggccatatcagcccaaacatgacggctatgcggcaaaggggcgcgagcttaaacagcacgtcatggccccgctgatttcttactttcgtgatgcgcgtgattcacttggggtaacatcgaaacagatagcggaagcgaccggaaagaaaaacatggcgtcacactggtttggtacaagtcagtggcagttgccgaacgagggtgattacaacaaattgcaggcgttgtttgcgcgtgctgcagcagaaaaacatcagcgcggggaactggaaaagccacaccaccagctggtcagcacatacagtgaactgaaccggcaatatgccagcctgctggaggaatacaaatcactgcggcgttatttttctgtatcggctgctgttccgtatacggatgtctggatgtataagcctgtacagtattacctcggcaaacatccctgtgaaaaaccggcggagatgttgcgtcagataattaccaccagcagtcgtccgggagatctggttgcagattttttcatggggtcgggttcgacggtcaaagcagcgatggcgctgggacgtcgtgcaattggcgttgagctggagaccgggcgttttgagcagacggtgagggaagttcaggatttagtcagtcagaacggatgatattgcagaattagttacgtaccgttattatcctgcgcccggccctttagctaagtggtgagagcgagcgactcataatcgccaggtcgctggttcaaatccagcaagggccaccataacataccgccattagctcatcaggaagagcagacgacacgataacagggttgttggtgcggggttcgagtcctggatggcggtccattatctgcatcatgcgttgttagctcagtcggacagagcaattgccttctaagcaatcggtcactggttcgaatccagtacaacgcgccacacttattttccctggctcgcttctgcgggcttttttgtatctgcgccgggtctggtactgattaccttaactaaaaggaatatatgtatatgaagtgtatattgttaaagtggatactgtgtctgttactgggtttttcttcggtatcctattcccaggagtttacgatagacttttcgactcaacaaagttatgtatcttcgttaaatagtatacggacagcgatatcgacccctcttgaacatatatctcagggagctacatcggtatccgttattaatcatacaccaccaggaagttatatttccgtaggtatacgagggcttgatgtttatcaggagcgttttgaccatcttcgtctgattattgaacgaaataatttatatgtggctggatttgttaatacgacaacaaatactttctacagattttcagattttgcacatatatcattgcccggtgtgacaactatttccatgacaacggacagcagttataccactctgcaacgtgtcgcagcgctggaacgttccggaatgcaaatcagtcgtcactcactggtttcatcatatctggcgttaatggagttcagtggtaatacaatgaccagagatgcatcaagagcagttctgcgttttgtcactgtcacagcagaagccttacggttcaggcaaatacagagagaatttcgtctggcactgtctgaaactgctcctgtttatacgatgacgccggaagacgtggacctcactctgaactgggggagaatcagcaatgtgcttccggagtatcggggagaggctggtgtcagagtggggagaatatcctttaataatatatcagcgatacttggtactgtggccgttatactgaattgccatcatcagggcgcgcgttctgttcgcgccgtgaatgaagagagtcaaccagaatgtcagataactggcgacaggcccgttataaaaataaacaatacattatgggaaagtaatacagcagcagcgtttctgaacagaaagtcacagtctttatatacaactggtgaatgaaaggagttaagaatgaagaagatgtttatagcggttttatttgcattggtttctgttaatgcaatggcggcggattgtgctaaaggtaaaattgagttttccaagtataatgaggataatacctttactgtgaaggtgtcaggaagagaatactggacgaacagatggaatttgcagccattgttacaaagtgctcagctgacagggatgactgtaacaatcatatctaatacctgcagttcaggctcaggctttgcccaggtgaagtttaactgagaatctacggtttatttatgcgcgtcttttgtttctggacgcagatattattagtgttgtggatgctgattaaatttggtcagtgttttcgttaaagtcatataaacacaggggcgttcacgcccctttttggtctgtagttgggtgaagatcatcactttactttgctcaaataactcagcacttgccggtttacccttaaggtaatacctacgttccataaaagaagcatcaatttcacctgacacctgatgtcggtgcttgctgagggcgtgttggtggtgctgtgctggccgtgctctggcctctactgcgcaaaacaaaatagcaccgcataaaaggcatctgcgggtgcctttgaccgggtgttgtttttatgggccgctggtggcccttttttatttacaggagaaaaagtatgtctgaacccttgtccggttccggcacggctgcggcgctcggcggggcgacggtattcgggctgtttaccggaacggatttcgggattgtgtttggtgcgttcgccggggcgttgtttgtggcaacgatgccgcaggcgctttcagcctggcgtgttgcggcgcattttctggtgtcgtttatcgtgggcgtactgggggcgcgcgtgctgtcagcctggattgctgtaaaaacagggcatgacggcacctctgctgatgcgctgtgtgctgtggtggtgtctgtattgtcggtaaaagtgctgtcctttgtgcacaggcaggacgttatatcactgatgtcctgtctgctctcccgcctgaagagtggaggaggcgacaatgttaagtagccttcccggattgctgaatgtggcgttatgcacggttatcgtgctgacgctctttttttatcgtcgccgtgattccagacataaaccgctgatgtcatggctggcctggctgctgatgctgctgtatgcctttgcgcccctcagctatctgtgtggtcgtccgttagcaacgggctggcttgaagtgttttttaatctgctgttctgcgtgctggtgatacgtgcacgcgggaatgtcacaaaaatctttccattgttgaggtgaatatgtcgggtaaattcagattcagccgccgcagtgaaaaaatctggagggcgtcaaaccacagctggttgctgtcgttcaccgcgccattgaactgacggaggttgatttcggtattacggaaggtctgcgcacgaaagagtgccagaaacaactggtcgcggaagggaaaagccagaccatgaacagccgtcacctgaccggtgatgcggtggatgttgtggcttatgttggtagccaggtgtcatgggactggcctctgtacgagaaaatcgcacaggcatttaagcaggctgccgcagagctgggaactgccatcgaatggggcggggactggaaaacactgaaagacgggcctcattttcaattgaagcgatagcttgcaaaacatacagggccgccatgagcggcttttttattgctcaaaaaacgaaagaacggaggtacgtatgtacgcactgaaaaaaattaccgtaactgaagatggtcgccaggttgaggaagtgcatgtcctgggagatatgtatcgtctggagttctatccgcgtgacactcatcttgcagcaaaaattgagtattgccggggcggggatattccatgtattccggtagaaaaagaggatgaggcttacattaccacgttgaccggagacacggtgcgttgtatctgtcgcggtgacagtaaagccaggaatgaaatagccagatgccgcacccagggcagtaaataaaaaaacaaaaccccggctgctggaacagtccggggttttgagttttcacgccaaagaggaaattgtgagtagtgagtacggagaaaatcctcgtgggaaagtataaaagattctttttgaggttgtccatcatgaaaggtattgaagtggaaactcccgcgagccttgatttgacaagggctgcggcctttgcaattcgccttgtggcggtcgctgttctgatttgggctgtgcgttggtggtgatatgacgcgaaaacactggacacacagagtgccgcgaacgacggcgaaatgggcactggtagcgatactggtgcctttttttctggtgggatgcgtcagcctggataaggcgcgccagcttttcgatgcggcttctcaggtctgccagcttatcgatggcgttcggcagtgtctgcagaactgaacacctgtaaaagcagaatattttgctgaaaaatgaagggttcgccagcgtccggaaagcatgaaattctgtgttagtggctattcaataaaataaattctttctgtcgccgcgaatactcaaatgttgatcagtgcccggtgcggcgacgggcttcgatatcaggagacgatgatggaaaaaacagaaaacaaaccgattgtaattggtgctgatgctgctccgtttaagtttgagttgtctcaactggtggagatgcgcatcagtgatgaatggggtgaggttaaagcccgcgcgcagtatgcgtatggcgaaaaccagtacttgatccactacaaagcagctgatggtcgcgccacgacggagtggtttggtgagtcaatgctggaagcaacagaagatgatcgccatccgggctgtccggtatttgccggtatgaaattaccggaaggcgcagttgttactgagtaacaggcattacagcagcccttcagtgaggggctgcgataatgcttgttgtaattagttaataagaaatgaaaatgcgccctgacaagggcgcaaaggcattacggatatggatcttcttttgcatcaccctggccgcttaaagcagtccatgagtttttcgtatgctccttaacgtttctgtttgggcaaggtgggagggatgtattggaggattttgtaaaagtgtatccgcaatcatcacaggagtacgtcccagaagatgtatcacttccatatggaatgcctgtttttttcataaaaatatcctgattaaaacatcacaacattgtgaccatacgaacattgtggttttgtgcgcgtatttcaatattgctttattgatatgtgtgtgatttacctcacgttttacgggtcctttccagaatctgaaacaccgggggtcatagcacgcgcaaaaacgcgctatttatgaaaatttttcaggaaaaaagcatgtcggtacttctcgcgcataactatttgttttttctgacatcacatcagtaaaaggtccgacatgaaaacacccgaaaaagggcattttaagcgttttcatgtcggaccctgtatttgatagagaaatgtattgtgaaagttaacaaaaagaaacttgccgaaatttttcaacgtggatccgcgaacgattgaacgctggcagtctcaggggctaccggtggtatcgaccaggacattgtgtatcagcgttcaaggaaacacggcactttttttgtgctcccataaaaggggcatcggtgtacggcaagccggtgatcaccatgcccaaaaagcgcaaccagcgtggtgtgtttttgtgtgaggtgggctccgataccgtcaaggaaatgctgtacgcccgttttgccctgccagtggtctctgccagtgaagccgccccgtacaccttccgttttcctgataaccccgacattttttcggaagaagaggcgcgtcagatcgtggcggaagagctggtggagaaggtggttaatggcagggtgaaactgctgtgggataaaaaagggcgacgcaacgaagccctcgactgcctggtatatgcctatgctgccctgcgtatttcagttcagcggtggcagctggatcttgaagcactggcccgtgccagaagagatgagcaggacgacgatgagatgagtctggaagaaatcgcggctgcactgagtggaggataaagaatggtttatacgcatgaaatgctttgtgatgcccgccgggcattacatgaactgatgatcggacgtgctgtggtttccgtcagcaaggacgggcgtcaggttcagtattcgcgggcgacgattggtgaactgcgtcagtatattgaagagctggaaagtgcgctgggcgtatccggacggcgtcgcggcccggcaggagtggggctgtgaacggggaactggtggatcttcacgggcagccactgcggcagagtatggggtattccggagggggtaccggatttggcgggcagcttgcggaatggctgcctgcaccggaaagtgccgacgtggcgctcttaccttccattcagctgggtaacgcccgtgcggatgatctggtccgcaataacggtattgccgcaaacgccgttgaaattcataaagaccatatcgtcggacacatgtttcttatcagctaccgtccgaactggcgctggctggggatgcgggagaccgcagcaaaaagctttgtcgatgaggtggaggcggcctggtcggaatacgccgaagggatgtctggcgagatcgacgtggaaggaaaacgcacgttcacggaatttatccgtgaaggtgtgggcgttcatgcgtttaacggcgaaatctttgtgcagccggtctgggatacggaaaccacgcagttattccgtacgcgttttaaagccgtgagtccgaaacgggtggacacgccaggacacggtatggggaaccgttttctgcgggccggggtggaggtcgatcgatatggccgtgccgttgcgtaccatatctgtgaggatgattttcctcgctccgggagtggacgatgggaacggatcccgcgtgaacttcccaccgggcgtccggccatgctgcatattttcgagccggtggaggacgggcagacccgtggggccaaccagttttacagcgtcatggaacggctgaagatgctcgattccctgcaggcaacacagcttcagtcggccattgtgaaagccatgtatgcagcgacgattgaaagtgaccttgataccgaaaaggcctttgaatatatcgccggtgcgccgcaggggcagaaggataatccgcttattaatattctggagaagttctccagctggtatgacacgaataacgtgacgctgggtggtgtcaaaattccgcaccttttccccggggatgatctgaaactacagactgcgcaggattcagacaatggattttcggcgcttgaacaggcgctgctgcggtatatcgccgccggtcttggcgtttcctacgaacagttgtcccgtgattactcgaaggtcagttattccagtgccagggcatccgccaatgagtcgtggcggtattttatgggcaaacgaaaatttgtggccagtcgactggcatcacagatgtttgcctgctggctggaggaagcgcttattcgcggtgtgatccgcccgccgaaatcccgtttttcattctgggaggcccgttccggatggtgtcgtgccgagtggattggtgccggtcgcatggcgattgatggccttaaggaagtgcaggaagcggtgatgcgtattgaaggtggtttaagcacgtatgagaaagagctggccctgatgggcgatgactatcaggagattttccgccagcaactgcgtgaaagccaggagcgacaggcagcgggtcttccccgccccatctggataaaggacacgtttcagcagcagatccgacagacaacgggagaaaaagtcgatgcgtcgtaatttatcgcatattgccgccatggcatttaatgagccgcttttactggaacccgcctatgcgcgggttttcttttgcgcgctgggtaaagagatgggtgccggcagccttgccgttcctcagcaggctgttcagcttgatgctgatggtatgcaactggctgtgactgactatatggcgggcggtcagcgtccggcaaagagttaccaggtgaagaatggcatcgccattcttccggtgagcggcacgctggtgcataaactgggtaccctgcggccttactccggcatgactggctatgacggcctgacggcccgccttcagatggcggtgaatgatccggatgtgcgcggcattttgctggatatcgacagcccgggcggtcaggctgccggggcgtttgactgtgctgacatgatttaccgtctgcgggaacagaagcccgtgtgggcgctgtgtaatgacatggcctgttcagccgccatgttgctggcggcagcctgtacccgtcggctggtcacgcagacggcaaaaattggttcgattggcgtgatgatggcgcacaccagttacgagaaacaactggcacaggaaggggtggacatcacgctgatttactccgggcagcataaggttgacggcaacagtattcaggcattgccggcaggtgtgcgtgcagattttcagcgccgtattgatgaggcccgccggatgtttgtcgacaaggtggcgctttatacggggctgagttcagaggcggtgatgaataccgaggctgccgtttatgacggtcaggcaggcattgatgcaggcctggctgatcaactgattaatgctgcagatgccgttgaagtgatggtttctgtactgaatgactctgttacgaaggagaatgcaatgactgttaaaaatctcaccgttgctgaagcggtggcccaggaaaatcagcgcgtgatggggatcctgaattgtcaggaggcgaaagggcgcgagcaactggcgcaaatgctggcaggtcagccaggaatgacggttgagcaggcgaaaacgttgcttgcagctgcgccggttgccggtactgacagcacgggcgatcagattatggggctgccggaagcaaaggggcgtgagcaactggcacagatgctggcaggtcagccggggatgacggtggagcaggcgaaagcgtttctggcggcagcccctgctgctggtgctgcaggcacaggcgatcagattatggcgttaaacaaccactcagtgacgtgttaaccgcaatcagtaatctggaagaacgggcagataatcttctgtgctttaatcaggacgggaatgcttcactgtctccgctgtcagaaaaagcccggtcactgctggcacaggtcacagtggaaaccatgcgcaatgagcttgagctgaaaagcgcagcggtaagggacattcagacagacctttacgacagctcggaaggccgcgttgcgctgcctggtgcatttggttacggaatgacggacgccggagcaagttcaattattgcccgcgatatggcgaccatagccaaaagcgcgcataacctgcacccgggacggtattacaccttttccacacaaacggaagaaacaaccgggataacagaaattatctggctggataatggctgggacgacaaaaccagccagacagcaacaaagctggttctgttttttggaaaagacggacggattcttatgaccgttcgtggcgataatatctccgcccctgtcacctggacgaatctgacgccacaacttggcaatgcagcacaaaaggatgcgcaggagaatatttacgaccgcgccgaaggccgtctggcgattaccggcatgtttggattcgggaaagtattttccagcggcgacaggaccgaatttaaaacagaggccgattttctccgctgggtaaaaatggcaaaacccggtcgttatgtcgtttatggcgcagataaagtgattcccggggtcctgttcagcggcaccgttgaaattatctggccggagcctcaagccaaccccaatccggcatatgtgcccaaaatcattattttttacggtattaacggccatatttattacaatcgctactggaatgccggagatggttatctggttggctgggaaaacctgaaagtcaacgaggcttcactccgggcactgattgaaacccgcgccccactgaacagcccggcactgaccggaacgccgtccacgccaacaccaccagatgatgcagcaggtaatgaaatagtcaatgcggcgtttgtccgcaaactgcttgccgcgctggttgactcatcaccggaagccctggacacgctgaacgagctggcagcggcgctgggcaatgacccggagtttgcgacgacaatcacgaacgcactggcaggtaaacagccgcttaatgatgtgttaacggctgtcagccagataacaccggaagaaaacacgctgccttatttcagcgcagagggccggattttactggcgcagctgtcagaaaaagcccgcgcattactggcactggacacgcctgaggccatgcgcacggagcttgagctgaaagcggctgcgacgatggaaccccagagcgatatccgcgaccgcacaccgggcaggctggcactgtccggcatgtatggattcggtcaggcatttgccagcaccgacgctcgggcatttaacggacaggccgattttgctgaatggctgaaagaggccacgccggggcgttatgcggtcagtattgcggactcttccacgctgctggctggcaccacgaaatttaacggcatcattgatgtgatgtggtccccctttgataacgacgaatcagatgcaatacgcaaattcaagacggcggtgttttacaaccagtattacgaaggtgagcacagtattcatcgcctgacttaccgctggagtggaaataactggaatgcaacagtaagtcccgtcatttacgacggagattcactggcgtacctgttgtccaggatggcgggctcaggctcatattacaaatacccggcagtgggagtgcctgttctggcggtctatcagggaacggcggctggcgataaggcaatcaaaattgggctgggtgacattgtaccggggtcgcgactcggtccggtaactatcacctgctcaattaatgatgcaggctcatatgtttccaccccacgcgtttctgccggaggtgccggggcattcagctttcccggtcgctatcaggcgctttctggattcagtaattcgtatggcgatgaaggccgcatttgtctgtttgtgcgcatcgagtaacggggaaataagacatgaaaatcagagcggtaaaaggcatcagaaacgcccattatctcgaaaatggtgcggttgactgcgaggtgttattgaaggtgaaacggaattcgtcccgtataccgccatgcaggacgatagcgccccgacaggccagcgcatctgggaagagttacagagcggcaaatggggtgaaatcgccccgttcaccgtcacgcctgaacttatcgcagcagcaaaggatgccaaaaagcgggaaatcgaggcatggcgtacagaacaggaagcacagccgttcacgttcgaatggaacggccgcacctggaacgctggccccgactcaatggcccgtctttatccggtagtaatggcggcgaaatctgacacggcgcgggacgttatggcgtggggtgacgccgataatcaacaggtgaaactgtcaatgccggaactggaagaactggcgacagcaatggcgcaggctcaggtcgatcgcaatgacgagatttatcagcgtcagcgggagatgaaggatgaactgaataatctggaggatttgcgctcaatcagagagatggcgattagcggcaatcacgctcgataaaattaaccccggtgatcatccggggttttgcatgcattaaaaccgcatcaaccgttccaccagttgttctttacgggcaacgatccagccgtgttgctccagataaaatttaaaccgttccagagtgcataccatcgcatcggcggggactttttccgtgaagtcgacctgaccgtgtttatcgaagtggatcagtaatgcacatccattatttggggcgggggagttttgtgctgcaggaggacgtttgtggagttcttcttccattgcgttaaatttttcaatgtaagcttcttttagtctggctgcttttttgccagtaaatcccattacgaggaacatgaagccgtcttttgtgatcaggtagcatcgtgattcacgttctgcgccgttgccaatttcgacagtctgaacatcggccgaaaagttggctgatgtaaattcgggagagcagtcgagtgcgtcaatcttagctaaaacgtgtttatgttgtttatcgaagtagtcggcaacagcttgagaggtggtaaccaggcgaccatctttgaaaaagacttttggtgactcgttagaaaaagttatagctgtattcatatgtgatgactccaattaattggatgatcaccacctctgacgccaatcagggaggtggtgagacgtacagggttggcgtaaccggtcatcacaaaacccggcgcggatttctccgcccctgcacgccccaccataatgcgaatgtggcaatgcttaacgcaaaaaaaaacgcaaacgcggctatgcgttgtgatgttatccgagacgccaatcccgacaaccgattttgcggttgtgtgaggaatatagccccggagaacaaaaactgtcaacgggcaaaaaaatttccgttatcagtaatgtataaaattaaagcgatcgagcaaaaaatcctttctgcaaaactaaaaaagatttcaataaaatcaggcagttaaaaacacggaaaaacggtataaaaaagcgcctcaaaatcctttttttctttcagatacaatgtcttattgcattttttaaaacatgtcagtgtggtacatggatatcgataccaccgccaattataagctgggcggtgcacagcaacacgatagcgtacgcctcgatccgtgggtgtttatgttctcagcaggatatcgtttttaattccgcacaaaaacgaccccgtaatatacggggtcaataaggacatggtataaagggtattatttcttcgcttctacgccatcagtttcagagcgaattaaaaatttctcagttgtttgcggaatattctgaatcagccagtcggccatttgcttttcctcatttaaaatcgcttcgatggttggaattgaagctgtatcaccggcattttttgctgctgctaatagtgaggtgtaacaggcgatttcaaattgctcgaagacatatccgctaatagagcctttgactatttcatcagaagggaatataccaccgattgactgcccaagcgcagccattttactcatggaatctttaatgactgaacgtgaaatgtcattacgatcaagaatagtttccagttgaacaatctggtttttggtttcactaagatgttgttcaatacgagcgcgtagttcaggataattatctatacggctggccatggattcaagcatagattcggcttgcttttccattgcgtgggcgtcacgtaaccagtcatgataatgttcaatacgattcatgaaaatgtcctctttataaaatgactaaaagttaaaattcatatttcaggctttattttcggctttcttatttacgttattaatggccagatcagtcagtttgatgtcggtggccttttcttcttccagggtttctttcagaagcttcgctgctttacggtaacctaattgttcagccagcgtcgctaatgtcccgtaactggcaatctcataatgctcgactttctgtgctgcggcaatcagtgcggcatcacgcacttcgtttttctcggtactttcgatgacctcattagcttcttcaataagaccttccattgccacacatttcatgcgcttaattttcaggttcgattcggactccacaacttgatcaatacgttcaatctgtccatgagtttcctcgaggtgcgcatgaaaagcctgacttaatttttcatttgatgttgctcttgcgagttttgccagtgcccgggttaattgtttttctgcgctgtaggtatctgaaagcaggtgaataaatacatcttcaatggtcttcatattcatatttttctccagtgaaatcactgcgagccatacggcccgcagatgcaattatctttatcagctgatattaataattaacggtgaatcaggatttgcctgatttattaccaccgctttgttgaccgccttttttacccgcttcagatgcgcgttgcggatcatttttaaaattaccgccgctatgctgaccgcctttacggcctgcgtcggatgccttctcacggtcttcggcgaaatttcctgaatcaccacgatgttcggccatgttatttctcccgttgcgttgcattgtttcattaatatgagtgttgtgtgtcgacactcattaaaattagtcgctaatgagaattagtcaaattaagcgcaacgagaagatagagggaaaatatattttgaggaacattctggatatattaacaattacctgaggaataagtgacttagagaaaattattgattttactggtgttatgttgcgggattaatttgtttgattatattactgttgggcggaaaaatgacgtaagttgacgttcgaccggggtaagcgaaacggtaaaaagataaatattaaatgaatttaggatttttccggcttcattaaagaaagttaaaatgccgccagcggaactggcggctgtgggattaactgcgcgtcgccgctttcatcggttgtacaaaaactttcagtgccgccagcattttctctggctcattaatatgttgctcgatgattttaacaatggccgaaccagaaatcgcgcccgcagctcctgcatcaatcgctgcttttacctgatccggggcggaaataccaaatccctgcaatggaggtgcagcgttgtactctttcagcttcgcaaccagatgattgaggggtaacgcggcgcggttttctgcgccggtcacgcctgctcgtgacagcaaataggtgtaaccacgaccgtaagaggctatctggcgcagcaggtcgtcatcggcatttggcgggcagatgaagataggtgcgacattatgacgcaacgcggcctggcggaagggcgcggactcttcaactggcacatcggcaaccagcaccgaatcgacgccgactttttcgcactgggcataaaactcatcaatgcctttgttaaacaccagattggcatacatcaacaggccaatgggaatggtcgggtgtttctggcgaatcagtgccagcatttcaaaacattgtgccggagtcacacctgccgcaaaggcgcgcagagtggcgttttgaatcgtcgggccatccgccagtgggtcggagaaggggatacctaactccagcgcgtcagcaccggcttcaattagcgtatcgataattttcaatgactgctcaatgcccggatcaccgagcgtgacgaaaggaacgaatgcgccttctttgcgctccttcaactgggcaaacagagattcgtagcgttccatcagatttcccctcgtgctttcaaaatatcgtgaacggtgaagatgtctttatcgccgcgaccggaaaggttaaccaccagtagctgctctttatccgggttttcgcgcatcattttcaacgcatgggccagggcgtgggaggattccagcgccgggatgatcccttcgtgcaggcacagcgttttgaaggcttcaagggcttcatcatcggtaatagacacgtaatcagcgcgtccagtgctgttaagatacgcgtgttgtgggccgacagacgggaaatccagtccggcggagatggagtaagattcttcaatctgcccgtcttcggtttgcatcatcggcgctttcataccgaaatagatacccacgcgaccatgttttagcggtgcgccgtgctcgccagtttcgataccgtgaccacctggctccacaccaatcaggccgacgttggtttcattgatgaaatcagcaaacatgccgatggcattcgaaccgccgccaacacaggcgataacggcatccggcaggcgaccttctctttccagaatctgcgctttggtttcttcgccaatcatccgctgaaactcacgcacaatggtcggataaggatgcgggccagctgcggtgcccagcatatagtgcgcggtttcgtaactaccggaccagtcgcgcagcgcctcgttacaggcatctttcagcgtcgcggaaccgctatgcaccgggatcacttccgcacccattaagcgcatacgaaaaacgttaggcgactggcgttcaacgtctttggcacccatataaatacggcatttcaggccgagcagggcgctggcaagggccgacgccacgccatgctgaccggcaccggtttcggcgatgatttcggttttacccatccgcttcgccagcaacgcctgccccagcacctggttagttttatgcgcgccgccgtgcagcaaatcttcacgcttgagatacagcgtggtgttcgtcccggctgtaatgttctggcatttggtcagcgcggttggacgcccggcatagtttttcagcaggtcgttgaactgagcctgaaattcaggatctttttgcgcactgacaaaagcttcttccagctggcgcagagcaggcatcaggatttgtggcacgtacatgccgccaaactcaccaaaataggggttaagtaatgttgtcattgttcctttccttaatatgcgcgcagcgtctggaaaaccgaggccaaaagacgtgcgtctttgatgcccggttgcgactctacagcagaattaaaatcaagtccggcgcagccggtttgtgccgcttccacgcagttatctgcgcctaagccccccgccagcagaacgttgccaagcgattgaccatttaatagtgaccagtcaaaacgttgcccgcttccaccctggccgttgtctaaaacatatttatcaacgtgctgaaactcgcgggcgggcagggtttcaccgacgcttaatgctttccagatggcaacatgtgctggcagagcttcacgcagcgtatcgatatacagctgttcttcattaccatgcagttgcactgccgccagcgataacaccttagctttgtccaccacatcggcaatatcgtgattgcggaacacgccaacatactgcaacggtgccgcagccatcacttcctgcgcctgttcaacgttgacgcaacgcggtgatgtcgcaacaaaaatcaacccaccgtaaatcgcgcccgcgtcataagctgctttagcatcttgcccacgcgtcaggccacatactttattctcacccagcaacacccggcgcacggcggcgtgcaaatcgtcatgggccatcaacgccgaaccaatcagaaaaccgttagcgaagtggcttaactcgcgcacctgagcgtaagtattgatgccggattcgctgattaccgtcacgttgtgccccagtttcggcgcaagctcgcgggtacggttgagatcaatcgacaaatcacgcagatcgcggttgttgatgccaacgacctttgctcccaatgcaatggcgcgctcctgttcctcttcattactgacttcggtcagcacccccatctccagactgtgagcgacggcggcaagctggcgatattggtcgtcatccagtactgaaagcattaataagcaggcatcggcctggtaatagcgcgccagatagatctggtaagggtcgataatgaagtctttacataaaatcggctgcggggcgatttggctgacgatggggaggaaattaaagctcccctgaaaatatttctcatcagtcagcaccgaaattgccgaagcgtaatgtttataaatggcggcaatgcgtgctggatcgaaatcatcacggatcacgccttttgacggcgacgctttcttgcactccagaataaacgccgtgcgcgcaccctgtagcgcatcataaaaatgtcgcgtgctcggctgaacctcattctgaaaactggccagcggttgctgctgtttgcgggcttctacccaaatcgccttgtctgcgacgattttcgctaaaacggtttgcatcatttaccctcgtgccgccagtgcggtgactctgtcgtaagcggaaccactgcgcagtacctcaagaacggtttgcgcattggcttgcagatcttcatggccatgcaggcgcattaacatggcgacgttcgcagcgacggctgcttcatgggcggcgtcgcctttaccttgtaacaaacgtgttaaaatgtcacggttttcttccggtgttccgcctgccagttgctcctggtggtagggtgtcaggccaaagtcttctgcggtgagctgatagcttttaatttcgccgtcatgcagttcggcaacgattgtcggcgcgtgtaatgaaacttcatccatcccgccgctgtgcaccaccgccgcgcgttgataccccagcacgcgcaaggtttcggcaatcggcagcaccagttccggactataaacaccaattaacgccagcggcggatgcgccgggttaatcaatggccccagcacattgaacagggtgcgggttttcagttgctggcgaaccggcatcgcgtggcggaatccggtgtgatacttcggcgcaaagaggaaacatacacctaactcatccagcgcctggcgcgatttatcggcgttcatatcaagattaataccgaacgccgccagcagatcggacgaaccagatttactggagacgctacggttgccgtgtttcgccactttcagcccacaggccgcggcgacaaacgcactggcggtagaaatattgatactgttgctgccgtcaccgccagtaccgacgatatcagcaaacagataatccgggcgcgggaacggcgctgcgttttccagtagcgcggttgctgccccggcgatctcgttcgggtgctcaccgcgaattttcatgctcaccagcgccgccgccagttgttccggcttcagctcgccacgcaccaccgctgaaaacagctggtggctttcttgttggctaagcgtctgcgcctgatacagtttttccagaatcggttgcagcgtgttggctggctctagtttctgctgcgcccaggccagcgtttgttccagcaggcgagcgccctgggtggtgagaatggattccggatggaactggaatccacaaacgcgatccgcatcgtgacgtactgccatcaccatgccattaaaatgggcgttgatggttaaaccggccggaatgttactgccaaccagcgagtgataacgcgccaccggcagcgggtttgttaatccggcaaacatcgcctgaccgtcatgttcaatgctggaggctttaccgtggagaatttcgcccgcctgaccgacatagcccccgtaagcttcgacaatcgcctgatgtccgaggcaaatgccaataatgggcagcttgccacgcaagcgggtgaggagttccggcatacaaccggcttcgctcggcacaccggggccaggagaaagcatcagcaccggattgctcatggtcgccaggcgttcaattaaggtttgcgccggaatatggttgcggtaaatcaccacgttatgcccattgctgcgcaactgatctgccaggttgtacgtaaaagagtcgatattatcgagcagcagaatgtcagccatcagaaagtctcctgtgcatgatgcgcggtggcaatagcgcgcagtacagcgcgggctttgttacgggtttcgtcggcttccgactgcggaacagaatcaaggactacaccagcacccgcttgcacggtggcgataccgttttccaccagcgccgagcggatcacaatgcaggtgtcgagatcgccatgcgcggtgaaataacctaccgcgccgccgtagctgccgcggcgacgaccttccgcctcggcaattaactgcatagcgcgtactttcggcgcaccgcttaacgtccccatattcatacaggcgcgataagcgtgcagggcgtcaagatcgtgacgcagttcgccgactacgcgagagacgaggtgcatcacataggaataacggtcaactttggtgagatcggcgacgtagcggctgccgggggtgcaaatgcgtgccagatcattacgggcgagatcaaccagcatcagatgttcagacagctctttatgatcggtacgcatttccagttcaatacggctgtcgagatctctgtccagtgaaccatcggcgcgacgaccgcgtgggcgtgttccggcaatcgggtagatctcaatctggcggctggtggcatcatacttgagcgagctttccggcgacgcgccaaatagggtgaaatcattatcctgcataaaaaacatgtacgggctgggattactctttttcagcacgtaataggccgccagcggtgacgggcagggcagagagaaacggcgagatggcaccacctggaaaatttctccagcgcgaatcgctttttgcaacaaacgcactacgccaccgaactcttcatcgctctgattacattcacaacgcatatgcggcacggaaaccactggcagcggcggcgcggcttcggtcagttgctgacgtagttcgttcaggcgagcagtgagacgttgtttttcttcttcattcggagcaaacaggctggcctgaatacgggtgctttttttctgatggtcaatcaccatcagcgtttcagcgagataaaaacagaaatcagggcagttattttccgctgacagttgcggtaaatcttcaaatcccgccacaaggtcataagagaacaggccgccgaagaacatggcttctcgttcttccttcggtacattcaacagattctgcaataaacggaaagcgtcaaaaaccgaaagggagcataagcgggcgtcttcatccagcagtggactgacaggggggaagcgcagcacacggcagtttggtgattgttcactttccacacccgcaggcagggcgttatccagtagtgccagcagggcttcgccgttgccggaaagtgcctggattgtgacagtgtcacctaaagctgtaatgcgcagcgcactgtctaccagcagcaggctttttaaatcatctttgctgtcgatatctgcggattccagcagcagcgttgccggacgatccccacacaactggtgaaaaagcgcggtgggattgtcgcgataagcgccttcgcaggttagcagttcgagagtcggtttttgtgtttgcattgttattctctaattttgttcaaaaaaaagcccgctcattaggcgggctgggtatctgattgctttacgcatggtgaatacactgcccgtttcaggaagtgcgccaccaacctttcagtacgaaaattgctttcattgtcgataccctttttacgtgaactttcgtactagttaactagttcgatgattaattgtcaacagctcatttcagaatatttgccagaaccgttatgatgtcggcgcaaaaaacattatccagaacgggagtgcgccttgagcgacacgaattatgcagtgatttacgacctgcacagccataccacagcttccgatggctgcctgacgccagaagcattggtgcaccgtgcagtcgagatgcgcgtcggcaccctggcgatcaccgaccatgacaccacagctgcaatcgcgccagcaagagaggaaatttcacgttcgggactggcgttgaatcttattcccggcgtggaaatttccacggtctgggaaaatcatgaaattcatattgtcgggctgaatattgatattactcatccgctaatgtgtgagttcctcgcgcagcagacagaacggcgcaatcagcgggcgcagctgattgccgaaagacttgaaaaagcgcaaatacctggggcgctggaaggcgcacaacgactggcgcagggcggcgcagtgacgcgcggtcattttgcgcgtttccttgttgagtgcggcaaagccagttcaatggcggatgtctttaaaaagtatctggcgcgcgggaaaaccggatacgttccgccacagtggtgtacaatagaacaagctattgatgtcattcatcattctggcggtaaggcggtgctagctcatcctgggcggtacaatcttagtgctaaatggctgaaaagattggttgcgcattttgccgaacaccacggtgacgcgatggaagtcgcgcagtgccagcaatcgcccaatgaacgtacccagctggcggcccttgcgcgtcagcatcatttatgggcatcacaaggatctgattttcatcagccatgcccgtggatcgaactgggtcgtaaactctggctgcccgcaggcgttgaaggcgtctggcagctatgggaacagccgcagaacaccacagagagggaattatgagccagtttttttatattcatcctgataacccacagcaacgtctgatcaaccaggcggtggagatcgtgcgtaaaggcggggtgattgtttatccaactgattccggctatgcgctcggctgtaaaattgaagataaaaacgcgatggagcgtatttgtcgtattcgccagctgccggacggtcacaactttaccctgatgtgtcgcgatctttctgaactctcgacctattcatttgttgataacgttgcgtttcgtttaatgaaaaacaacacgccgggcaactataccttcatcctgaaggggacgaaggaagtgccacgccgtctgttgcaggaaaaacgcaaaaccatcggtatgcgtgtgccttctaaccctatcgctcaggcgttacttgaagcattgggcgaaccgatgctttccacttcgctaatgctgccaggcagcgaatttaccgaatcggacccggaagaaattaaagatcgtctggaaaaacaggtagatttgattattcacggcggctatctcgggcagaaaccgacaacggttattgatcttaccgatgatacgccggtcgtggtgcgtgaaggcgtaggtgatgtgaagcctttcttataacaaattgcgttccacggatggaagactatggcagggaagtttcgctacattttgctgttgatagcagggctgtttgtatcatctctaagttatgcagaaaacacggagatcccttcttatgaagaagggatctcgctctttgatgttgaagccactctgcaaccagatggggtgctcgacatcaaagaaaatattcattttcaggcgcgaaatcagcagattaagcacggcttttatcgtgatttaccacgactatggatgcagcctgatggggacgctgcactgctgaactatcatattgttggcgtcacccgtgatggtattcctgaaccctggcatcttgactggcatatcgggttaatgagtattgtcgtgggcgataaacaacgtttcttgcctcaaggcgactatcattatcaaattcattatcaggttaaaaatgctttcctgcgtgagggggattctgatctgctaatctggaacgtgaccggtaaccactggccgtttgaaatttataagacccgtttttctctccagttctctaatattgcgggtaatccatttagcgaaatcgatctctttaccggagaagagggcgacacatatcgtaatggccgcatccttgaggacggaagaattgaatcccgcgatccgttttatcgtgaagatttcacggtcctctaccgctggcctcacgctttacttagcaatgcctcggctccgcaaacgacgaatattttcagccatcttcttttaccctccacgtcatcgttgttaatttggtttccgtgtctgttcctggtttgtggatggttatatctctggaagcgcaggccgcaatttacgccggtagatgtgattgaaaccgatgtcattccgccagattacacgcccggcatgttacgtctcgatgcgaagctagtttacgacgataaaggtttttgtgccgatatcgtaaatctgattgtgaaaggaaaaattcatctggaagatcagtctgacaagaaccagcaaatcctgattcgtgttaatgaaggcgcgaccagaaataatgcggtattactgcccgcagagcagttattactggaagcgttatttcgtaaaggcgataaggtcgttcttacggggagacgcaacagagtcttacgcagggcatttttacggatgcagaaattttatctgccgcgtaaaaagtcttcgttttaccggtctgatacttttttgcaatggggtggactggcaatattggcggtcattctttacggtaacttgagtcctgtaggctgggcaggaatgagtctggtgggcgatatgtttattatgatctgctggattattccttttttattttgttcccttgagcttttgtttgcccgcgatgatgacaagccttgcgttaatcgtgtaatcatcactttgtttttaccactgatttgttcaggcgtggccttctattctctctacatcaatgtcggagatgtattcttttactggtatatgccagcgggttattttaccgctgtttgcctgaccggttatctcactggcatggggtatatttttctgccaaagtttacccaaactggacagcaacgttatgcccacggtgaagctatcgttaactatcttgcgcgtaaagaggcagcaacacacagtggacgtcggcggaaaggggaaacacggaaactggattacgcgttgctaggttgggctatatcggcaaatttggggagggaatgggcgttacgcattgccccttcgctttcttcggcgattcgcgctccagagattgcccgtaacggcgttttattctcattacagacgcacctaagttgcggggccaataccagtttgttggggcgaagttattccggtggtggtgctggcggcggcgcgggtggcggaggcggtggtggctggtaattaagctgatgttaatcgaaacaagctttaaccataaagatagtgtagtatgttgcgcctcaaagccaggccgataaacgtcgagtcgtttacttaaggcctgaagagttcaaacagactttactatcagtgagtcagatgtaagttctgactcactgttgcacaaaagcatatcagacgcctgggaaggcgacaccaaaaggaagctctatgagcgaaaagctacagaaagtgctggcgcgtgccggccacggttctcgccgtgaaatcgaatctattattgaagccggtcgtgtgagtgttgatggcaaaattgctaaactcggcgatcgtgttgaagttacccctggattgaaaatccgtatcgatggtcacctgatttcggtacgtgagtccgctgaacaaatttgtcgcgttctggcctattacaaaccggaaggtgagttgtgtacccgtaacgatccggaaggacgtccaacggtgtttgaccgtctgccaaaactgcgtggcgcacgctggattgccgtgggtcgcttggacgttaatacctgtggtctgctgctgttcaccaccgatggtgaactggcaaaccgtttaatgcacccaagccgtgaagttgaacgtgaatatgccgtgcgtgtatttggtcaggttgacgacgcgaaactgcgtgatttgagtcgtggcgtgcagttggaagatggtccggcagcttttaaaaccatcaagttcagcggcggcgaagggatcaaccagtggtacaacgtgactctgaccgaaggccgtaaccgtgaagttcgtcgtctgtgggaagcggttggtgtgcaggtgagccgcctgatccgtgttcgttacggtgatatcccactgccaaaaggtctgccacgcggtggctggacggagctggacctcgcccagactaactatctgcgcgaactggtggagctaccgccagaaaccagctctaaagtcgctgtagaaaaagaccgtcgtcgcatgaaggcgaatcagattcgtcgtgcggtgaaacgtcacagtcaggtgagcggcggtcgtcgttctggcggacgtaataataacggttaatcaaagtatgccggacgtcatatccggcatttttacagattaataatcgatccctatctgcgcttttacaccggcatcaaacgcatgtttgacggggcgtaattcacttaccgtatctgccagttcaagaatatcccgatgacaaccacgacccgtgataatcaccgtctgttgatgtggacgttcatttaacgcctgcaccacttcttccagtggcaaatagtcatacgccaccatatacgtcagttcatcaagcaaaaccatatccagtgaggaatcagcaagcatccgctttgcatgttgccagacttcgcggcaggcggcggtatcagactcgcggttttgtgtatcccaggtaaagcccgttgccatcacctgaaactcaacgccatgtggctccagcagattgcgttcgccattaggccaggtgcctttaataaactgcacgacgcctactttttttccgtgaccaactgcgcgtgttgccgtaccaaatgccgcggtggttttgccttttccattgccggtaaagacgatgataataccgcgttcatcctgggcctgggccacacgagcatctactttttctttcactcgctgctgacgctgttggtagcgttcatcactcattgggaaattcctggtttacggcccggttgggcgtcaaaggtcatgccggttttacggcggctgtcatcgcccatcagccagaggtagagcggcatgatatcagcgggtgttttaagtttctgtggatcttcggtcgggaaggcgctggcacgcattgcggtgcgcgtaccgcctgggttaatgcagttgacacgcaggcgctgctgatattcatcggccagtacctgcatcatcccttcggtggcaaatttcgacgctgcatatgcaccccagttggctcgtccctgacgtccaacgcttgatgaagtaaagaccagtgaaccggcgtccgatttgagtaataaaggaagcagtgcctgggtgagcataaaggtggcattaacgttgacctgcatgacgtcctgccagacctgcggattttgttcgctcattgggcaaacatcgccgagcaatccggcattatgcaaaacaccatccagacgcggataattaacggcaatgcgctgtgccagttgttggcaattttcggacgtgcaggtcagcaaatcgagaataaaccactgtggctgacgcccagtttcttcgtttatgtggctggctacctgacgtaatttttcttcattacggcccaacagaatcactgtcgcaccatagcgtgcatacgtcatcgcggcttcacgaccaataccatcgctggctcccgtcaccaggataatgcgatcattgagtaaatcttgttttggctggtaatgcatggctactcctcaacgacgttgtctgtcgcgctgccagtgtactttatgactttggggctttatgcctgaaacagaagggcatttcaatcagcctggggcgataacaccgcaaaatggatactttgtcatactttcgctgcaataacatctctgcgagacggcttaacatgcctgttgtaaactgtgagccaaagcgttgtttaaccaaggtggggactcgtggaattgttgtctgaatatggtttgtttttggcgaaaatcgttaccgttgtgctagcgattgcggcgattgccgccattattgtcaatgttgctcaacgtaataaacgccagcgtggcgagttacgggtcaacaatctcagcgaacagtataaggagatgaaagaagaactggccgcggcgctgatggactcacatcagcaaaaacagtggcacaaagcgcagaagaaaaagcataagcaagaagcgaaagcagcaaaagcgaaagccaaactgggcgaggtggcaactgacagtaaaccccgcgtctgggtgctggattttaaaggcagcatggacgcccatgaagtgaactcgctacgtgaagagataacggctgtactcgcagcattcaaaccgcaggatcaggttgtgctccgtctggaaagccctggtggcatggtgcatggttacgggctggcggcttcgcaactgcagcgtctgcgcgataaaaacattcctttaactgttacggtagacaaagtcgctgccagcggcggttacatgatggcctgtgtggcggacaaaattgtttccgcaccgtttgctattgtgggttccattggcgtggtggcgcaaatgcccaactttaaccgcttcctgaaaagcaaagatattgatatcgaactgcacactgccgggcagtataagcgcacgctgacgttgctgggtgaaaataccgaagaagggcgggagaaattccgcgaagagttgaacgaaacgcatcagttgtttaaagattttgtgaagcgtatgcgtccttctctggatattgaacaggtggcaacgggtgaacactggtacggacaacaggcggtagagaaaggcctggttgatgaaatcaacaccagtgatgaagttattcttagcctgatggaaggccgtgaagtggtcaatgtacgctatatgcagcgtaaacgactcattgaccgattcaccggcagcgcggcagagagcgccgatcgattgttgctacgctggtggcagcggggtcaaaagccattgatgtaaaagacaaacgcgaggctaagacctcgcgttttgctttaatcaaccagatgatatttttctgaaagcacatgggccaggtgtttgaacatattaaacaccgcggtgcttttggctgttggcaatccttgttcatctaaaaagtagtcgccggtaaataccagcacgccattacgctgcgtgacgccggtggcttcaatccctgcgagcgtatcctcatgctcacgaatgattttgttggcctctttcaacagcgtttcgcggtcgatgggttgtgtctctttgttcattatttactccttaaacaaggacattagtctacgccaggcatggcttgcagacaaatataccacgctggtggcaagagcgccttactggcaactttggattttgcatgctaataaagttgcgtatcggattttatcaggtacagtgtgacgctttcgtcaatctggcaatagatttgcttgacattcgaccaaaattccgtcgtgctatagcgcctgtaggccaagacctgttaactcagtcacctgaattttcgtgaacagagtcacgacaaggggttgatatccgcagagagcgagtccatatcggtaactcgttgccagtggaaggtttatcaacgtgcgacgcattcctggaagaatcaaattaggtaaggtgaatatgggtaaagctcttgtcatcgttgagtccccggcaaaagccaaaacgatcaacaagtatctgggtagtgactacgtggtgaaatccagcgtcggtcacatccgcgatttgccgaccagtggctcagctgccaaaaagagtgccgactctacctccaccaagacggctaaaaagcctaaaaaggatgaacgtggcgctctcgtcaaccgtatgggggttgacccgtggcacaattgggaggcgcactatgaagtgttgcctggtaaagagaaggtcgtctctgaactgaaacaactggctgaaaaagccgaccacatctatctcgcaaccgaccttgaccgcgaaggggaagccattgcatggcacctgcgggaagtgattgggggtgatgatgcgcgctatagccgagtggtgtttaacgaaattactaaaaacgcgatccgccaggcatttaacaaaccgggtgagctgaatattgatcgtgttaatgcccagcaggcgcgtcgctttatggaccgcgtggtggggtatatggtttcgccgctgctatggaaaaagatcgctcgtggtctgtctgccggtcgtgtgcagtcggtggcggttcgcctggtggtcgagcgtgagcgtgaaattaaagcgttcgtgccggaagagttctgggaagtcgatgccagcacgaccacgccatctggtgaagcgttggcgttacaggtgactcatcagaacgacaaaccgttccgtccggtcaacaaagaacaaactcaggctgcggtaagtctgctggaaaaagcgcgctacagcgtgctggaacgtgaagacaaaccgacaaccagtaaacctggcgctccttttattacctctacgctgcaacaagctgccagcacccgtcttggatttggcgtgaaaaaaaccatgatgatggcgcagcgtttgtatgaagcaggctatatcacttacatgcgtaccgactccactaacctgagtcaggacgcggtaaatatggttcgcggttatatcagcgataattttggtaagaaatatctgccggaaagtccgaatcagtacgccagcaaagaaaactcacaggaagcgcacgaagcgattcgtccttctgacgtcaatgtgatggcggaatcgctgaaggatatggaagcagatgcgcagaaactgtaccagttaatctggcgtcagttcgttgcctgccagatgaccccagcgaaatatgactccacgacgctgaccgttggtgcgggcgatttccgcctgaaagcacgcggtcgtattttgcgttttgatggctggacaaaagtgatgcctgcgttgcgtaaaggcgatgaagatcgcatcttaccagcagttaataaaggcgatgctctgacgctcgttgaacttacaccagcccagcactttaccaagccgccagcccgtttcagtgaagcatcgctggttaaagagctggaaaaacgcggtatcggtcgtccgtctacctatgcgtcgatcatttcgaccattcaggatcgtggctacgtgcgagtagaaaatcgtcgtttctatgcggaaaaaatgggcgaaatcgtcaccgatcgccttgaagaaaatttccgcgagttaatgaactacgactttaccgcgcagatggaaaacagcctcgaccaggtggcaaatcacgaagcagagtggaaagctgtactggatcacttcttctcggatttcacccagcagttagataaagctgaaaaagatccggaagagggtggtatgcgcccgaaccagatggttctgaccagcattgactgcccgacttgtggtcgcaaaatggggattcgcacagcgagcaccggggtattccttggctgttctggctatgcgctgccgccgaaagagcgttgcaaaaccaccattaacctggtgccggaaaacgaagtgctgaacgtgctggaaggcgaagatgctgaaaccaacgcgctgcgcgcaaaacgtcgttgcccgaaatgcggcacggcgatggacagctatctcatcgatccgaaacgtaagttgcatgtctgtggtaataacccaacctgcgacggttacgagatcgaagagggcgaattccgcattaaaggttatgacggcccgatcgttgagtgtgaaaaatgtggctctgaaatgcacctgaaaatggggcgtttcggtaaatacatggcctgcaccaacgaagagtgtaaaaacacacgtaagattttacgtaacggcgaagtggcaccaccgaaagaagatccggtgccattacctgagctgccgtgcgaaaaatcagatgcttatttcgtgctgcgtgacggtgctgccggtgtgttcctggctgccaacactttcccgaaatcgcgtgaaacgcgtgcgccactggtggaagagctttatcgcttccgcgaccgtctgccggaaaaactgcgttatctggccgatgcgccacagcaggatccggaaggtaataagaccatggttcgctttagccgtaaaaccaaacagcaatatgtctcttcggaaaaagacggaaaggcgactggctggtcagcattttatgttgatggcaaatgggttgaaggaaaaaaataacctttaattctgtcaggtttttataaacaaagggtcgcgaaagcggcccttttttattgcatattattttttcttcacacctatacactaaggctataaatgatatagtggttatagttagcaccttttttattattaaatcgtattagtcacccgccaggtgtgacgaaaaaacgatgttctgatggcgtctaagtggatggtttaacatgaaattacaacaacttcgctatattgttgaggtggtcaatcataacctgaatgtctcatcaacagcggaaggactttacacatcacaacccgggatcagtaaacaagtcagaatgctggaagacgagctaggcattcaaattttttcccgaagcggcaagcacctgacgcaggtaacgccagcagggcaagaaataattcgtatcgctcgcgaagtcctgtcgaaagtcgatgccataaaatcggttgccggagagcacacctggccggataaaggttcactgtatatcgccaccacgcatacccaggcacgctacgcattaccaaacgtcatcaaaggctttattgagcgttatcctcgcgtttctttgcatatgcaccagggctcgccgacacaaattgctgatgccgtctctaaaggcaatgctgatttcgctatcgccacagaagcgctgcatctgtatgaagatttagtgatgttaccgtgctaccactggaatcgggctattgtagtcactccggatcacccgctggcaggcaaaaaagccattaccattgaagaactggcgcaatatccgttggtgacatataccttcggctttaccggacgttcagaactggatactgcctttaatcgcgcagggttaacgccgcgtatcgttttcacggcaacggatgctgacgtcattaaaacttacgtccggttagggctgggggtaggggtcattgccagcatggcggtggatccggtcgccgatcccgaccttgtgcgtgttgatgctcacgatatcttcagccacagtacaaccaaaattggttttcgccgtagtactttcttgcgcagttatatgtatgatttcattcagcgttttgcaccgcatttaacgcgtgatgtcgttgatgcggctgtcgcattgcgctctaatgaagaaattgaggtcatgtttaaagatataaaactgccggaaaaataatttcttgcgttattttcggcaccttttatgtagcgaaggtgccggaatatattctcttttgttacttatttctataccgtgcacaatatttttatccctcatatttatagggtaaattacctgtaaagtagtgtctaattacccgcctcgcaaactccagttttcaaatatctatttcaggtcaaaagattgaattattcactggagacgattcgtaaattcgctggatttttgactaaagtttctttaggatttgtctcatcgtatgattaattacaccaatcgttcaacgtcttgctgataagtgatggcgattatatgaggttagcaatgccttctggaaatcaggaaccccgccgcgatcctgaattaaaacgtaaagcctggctggcggtttttcttggttctgcacttttctgggtggttgtcgcactgctgatttggaaagtgtggggataactatggtcggtcaggagcaactggagtcgtcaccattatgccagcatagtgacaatgaaacagaaacgaaacgggaatgttccgtcgttattccagacgactggcaactaacatcgcagcagcaagcctttatagaactgtttgctgaagatgatcagccgaaacaataattatcatcattcttattacccatttttaatgaattaaagggcttttaatacaccgcagcaataacagcttgagttatctcaacacaaaataataaccgttaagggtgtagcctatgatcaacacaaatatgaaatattggtcctggatgggcgcgttttctctgtcgatgctcttctgggccgaactcctctggatcattactcactgatccttgaccccgctgcggcggggttgtcatttgctttgccacaaggtttctcctcttttatcaatttgggttgttatcaaatcgttacgcgatgtttgtgttatctttaatattcaccctgaagagaatcagggcttcgcaaccctgtcattaaggaggagctatgtcgtcaaccctacgagaagccagtaaggacacgttgcaggccaaagataaaacttaccactactacagcctgccgcttgctgctaaatcactgggcgatatcacccgtctacccaagtcactcaaagttttgctcgaaaacctgctgcgctggcaggatggtaactcggttaccgaagaggatatccacgcgctggcaggatggctgaaaaatgcccatgctgaccgtgaaattgcctaccgcccggcaagggtgctgatgcaggactttaccggcgtacctgccgttgttgatctggcggcaatgcgcgaagcggttaaacgcctcggcggcgatactgcaaaggttaacccgctctcaccggtcgacctggtcattgaccactcggtgaccgtcgatcgttttggtgatgatgaggcatttgaagaaaacgtacgcctggaaatggagcgcaaccacgaacgttatgtgttcctgaaatggggaaagcaagcgttcagtcggtttagcgtcgtgccgccaggcacaggcatttgccatcaggttaacctcgaatatctcggcaaagcagtgtggagtgaattgcaggacggtgaatggattgcttatccggatacactcgttggtactgactcgcacaccaccatgatcaacggccttggcgtgctggggtggggcgttggtgggatcgaagcagaagccgcaatgttaggccagccggtttccatgcttatcccggatgtagtgggcttcaaacttaccggaaaattacgtgaaggtattaccgccacagacctggttctcactgttacccaaatgctgcgcaaacatggcgtggtggggaaattcgtcgaattttatggtgatggtctggattcactaccgttggcggatcgcgccaccattgccaatatgtcgccagaatatggtgccacctgtggcttcttcccaatcgatgctgtaaccctcgattacatgcgtttaagcgggcgcagcgaagatcaggtcgagttggtcgaaaaatatgccaaagcgcagggcatgtggcgtaacccgggcgatgaaccaatttttaccagtacgttagaactggatatgaatgacgttgaagcgagcctggcagggcctaaacgcccacaggatcgcgttgcactgcccgatgtaccaaaagcatttgccgccagtaacgaactggaagtgaatgccacgcataaagatcgccagccggtcgattatgttatgaacggacatcagtatcagttacctgatggcgctgtggtcattgctgcgataacctcgtgcaccaacacctctaacccaagtgtgctgatggccgcaggcttgctggcgaaaaaagccgtaactctgggcctcaagcggcaaccatgggtcaaagcgtcgctggcaccgggttcgaaagtcgtttctgattatctggcaaaagcgaaactgacaccgtatctcgacgaactggggtttaaccttgtgggatacggttgtaccacctgtattggtaactctgggccgctgcccgatcctatcgaaacggcaatcaaaaaaggcgatttaaccgtcggtgcggtgctgtccggcaaccgtaactttgaaggccgtatccatccgctggttaaaactaactggctggcctcgccgccgctggtggttgcctatgcgctggcgggaaatatgaatatcaacctggcttctgagcctatcggccatgatcgcaaaggcgatccggtttatctgaaagatatctggccatcggcacaagaaattgcccgtgcggtagaacaagtctccacagaaatgttccgcaaagagtacgcagaagtttttgaaggcacagcagagtggaagggaattaacgtcacacgatccgatacctacggttggcaggaggactcaacctatattcgcttatcgcctttctttgatgaaatgcaggcaacaccagcaccagtggaagatattcacggtgcgcggatcctcgcaatgctgggggattcagtcaccactgaccatatctctccggcgggcagtattaagcccgacagcccagcgggtcgatatctacaaggtcggggtgttgagcgaaaagactttaactcctacggttcgcggcgtggtaaccatgaagtgatgatgcgcggcaccttcgccaatattcgcatccgtaatgaaatggtgcctggcgttgaaggggggatgacgcggcatttacctgacagcgacgtagtctctatttatgatgctgcgatgcgctataagcaggagcaaacgccgctggcggtgattgccgggaaagagtatggatcaggctccagtcgtgactgggcggcaaaaggtccgcgtctgcttggtattcgtgtggtgattgccgaatcgtttgaacgaattcaccgttcgaatttaattggcatgggcatcctgccgctggaatttccgcaaggcgtaacgcgtaaaacgttagggctaaccggggaagagaagattgatattggcgatctgcaaaacctacaacccggcgcgacggttccggtgacgcttacgcgcgcggatggtagccaggaagtcgtaccctgccgttgtcgtatcgacaccgcgacggagttgacctactaccagaacgacggcattttgcattatgtcattcgtaatatgttgaagtaacaactatttgcttgccggttattttgcttccggcaagcaaatgaattacacaatgcaagagggttatttgttcagcaaatggcccattttctcggctttggtatcgagataatgttcgttattggggttacgacctacaatcaatggtacgcgttcaacaatattaatccctgcttcggtcagaatttcgacttttttcgggttattggttaacaagcggacttcattgacgccaaggagtttgaacatatcagcgcaaagagtgaagtcgcgctcatcagcggcgaagcctaactggtggttagcctctacggtatcgtaaccttgatcctgcagtgcgtaagcgcggattttattcagcagaccaatgttacgaccttcctgacggtgatacagcaaaataccacggcctttctcggcaatttgcgtcaatgccgcttcgagctgaaagccacaatcgcagcgcaagctgaacagggcgtcaccggtcagacattcggaatggacgcgcgcaagtaccggggtatgcccggaaatatcgccatagactagcgcgacatgatcgtgtccggttgccagttcttcaaatcccaccatcaggaaatcgccccatggggttggcagtttggcttctgccacacgtttaagctgcatgaaattctccagataatgctggttctgtattggcttattttgccataacgagaaggggttcacctaatcacgacgcgtcgatcgttcacggaatggcacaaatctgtcaatttttcctggaactggcgttttcagttatgattgtgggacttatcaaaaaggagaggccatgcgttcgattgccagacgtaccgcagtgggagctgcactattgcttgtcatgccagtagccgtatggatttctggctggcgttggcaacctggagaacaaagttggctactaaaagcggctttttgggttactgaaactgtcacccagccctggggcgtcattacacatttgattttattcggctggtttctctggtgtctgcgttttcgcattaaggctgcctttgtattatttgccattctggcggccgcaatccttgtgggacaaggcgttaaatcctggatcaaagacaaagtccaggaaccacgaccttttgttatctggctggaaaaaacacatcatattccggttgatgagttctacactttaaagcgagcagaacgcggaaatctagtgaaagaacagttggctgaagagaaaaatatcccacaatatttgcgttcacactggcagaaagagacggggtttgcctttccttccggtcacacgatgtttgctgccagttgggcactgctggccgttggtttgctgtggccgcgtcggcgaacgttaaccattgctatcttgctggtctgggcaacgggagtcatgggaagccgcctgctgctcgggatgcattggccacgcgatctggtagtagctacgttgatttcgtgggcgctggtggcggtggcaacgtggcttgcgcaacgaatttgtgggccattaacaccacctgcggaagaaaatcgcgaaatagcgcaacgagaacaagaaagttaacgctggttgattttccgaatttagcccttaaatcatcaacaatgcgtgtggatgccatttcgcagacggcgcgaaaatggtactttaaagggctattgcggtaagttgaccataatttattcgctctaaccacataacgggaagtaatgtgaaatatttactcattttcttactggtgttagcgatcttcgtgatttcggtcacgttgggtgcgcagaacgatcaacaggtgacgtttaattatctgttagcgcaaggggagtaccgtatttccacattgctggcggtattgtttgctgcggggtttgctatcggttggttgatttgtggcctgttctggctgcgagttcgtgtttccctggcgcgcgctgaacgtaaaataaagcgactggaaaaccagctttcacccgcgactgacgtggctgtagtgccgcactcgtcagcggcgaaggaataactttctatgctggagttgttgtttctgcttttgcctgtagccgctgcctatggctggtatatgggccgcagaagtgcgcaacaaaacaagcaagatgaagccaaccgcttgtcgcgtgattacgtagcgggggttaacttcctgcttagtaatcaacaggataaagcggtagacctgtttctcgatatgcttaaagaggatacaggcaccgttgaagcccaccttacgctcggaaacctgttccgttcgcgtggcgaagttgatcgcgctattcgcatccatcagaccctaatggaaagcgcctcgctgacctatgaacagcgtctgttggcgattcaacaactggggcgtgattacatggccgccgggttatatgaccgcgcggaagacatgttcaatcagctgaccgatgaaactgacttccgcattggcgcgctgcaacagttgctacaaatctaccaggctaccagtgagtggcagaaagcaattgatgttgccgaacgcctggtgaagctgggtaaagataaacagcgcgtcgaaattgcccatttctactgtgagttagccctgcagcatatggccagcgacgatctcgatcgtgccatgaccttgctaaaaaaaggggcggcggcagataaaaacagcgcccgcgtatccataatgatgggacgcgtgtttatggcgaaaggagaatacgccaaagccgtcgaaagtctgcaacgcgtgatatcccaggacagagaactggtcagcgaaacgctggaaatgttgcaaacctgctatcagcagttgggtaaaactgccgaatgggcagaattcctgcagcgtgcggtggaagagaacaccggtgccgatgctgaattgatgcttgctgatatcatcgaagcgcgcgacggtagtgaggccgcacaggtctatattacgcgccagcttcagcgtcatccgaccatgcgtgtgttccataagttaatggattaccacttaaatgaagcggaagaagggcgtgccaaagagagcctgatggtgctgcgtgacatggttggcgagaaggtacgtagtaagcctcgttatcgttgccagaaatgtggttttaccgcatacaccctctactggcattgtccgtcttgtcgggcctggtcaaccattaaaccgattcgcggtcttgatggcctgtaatttttaaaaaaaatccgactttagttacaacatactaattattaatgttccattgtgctccggcaacgacggcgcagaaaaagcctgccaggggagaaatcgcaactgttaattttttatttccacgggtagaatgctcgccgtttacctgtttcgcgccacttccggtgcccatcatcaagaaggtctggtcatgacgttaactgcttcatcttcttcccgcgctgttacgaattctcctgtggttgttgcccttgattatcataatcgtgatgacgcgctggcctttgtcgacaagatcgacccacgcgattgtcgtctgaaggtcggcaaagagatgtttacattgtttgggccacagtttgtgcgcgaacttcaacagcgtggttttgatatctttcttgacctgaaattccacgatatccccaacactgcagcgcacgctgtcgctgctgcagctgacttaggcgtgtggatggtgaatgttcatgcctctggtggggcgcgtatgatgaccgcagcgcgtgaggcactggttccgtttggcaaagatgcaccgcttttgattgctgtgacagtgttgaccagcatggaagccagcgacctggtcgatcttggcatgacactgtcacctgcagattatgcagaacgtctggcggcactgacgcaaaaatgtggccttgatggtgtggtgtgttctgctcaggaagctgtgcgctttaaacaggtattcggtcaggagttcaaactggttacgccgggcattcgtccgcaggggagtgaagctggtgaccagcgccgcattatgacgccagaacaggcgttgtcggctggtgttgattatatggtgattggtcgcccggtaacgcaatcggtagatccagcgcagacgctgaaagcgatcaacgcctctttacagcggagtgcatgatgagtgattccaacagccgtctggtctactcaacggaaaccggacgtattgatgagcccaaagcggcccctgtacgccctaaaggcgacggtgtggtgcgtattcagcgtcagaccagtggacgtaaaggtaagggcgtttgcctgattaccggtgtcgatctcgatgatgccgaactgacaaaacttgcagcggaactgaagaaaaaatgcggctgcggcggagcagttaaagatggagttattgaaatccagggcgataagcgtgatttattaaaatcactacttgaagcgaaagggatgaaggtaaaactcgcaggcggttaacataaaaagccacggatatatccgtggctttcgaatattttactgtgcgtattattcagttatttcgtactgaacagaatcaagcgtattataattgcgagtcgataatcgacatttatttacgattatttaccgacctggtgaccaataacaccaccgacagctgcaccacctaatgtacccaacgtactgccatcggtcagtactgcaccgcctaatgcccctgcacccgcgccgattgcggtgttgcggtcccgtttagaccagttagaacaggcactcagagacattgccaaagtaattgccagaacagccgcggtcatttttttgctcgttacaaacataatactctctcctgaatttatgattcacggaagtaagctctctataactataatagctaagaataagcctggtgaaattattccgtgaaatctgctcgcgcgcagggttatatcacgcaggtgataatgacttcctgttatatcgctgataataattttatatcttgagagtgttaataacaggtaaatagtcttaattatcaaccaggaatcatcttagagcggatgatttgccaaactgcaaatcatccgtagagaagggaaatggttaaatgtcaacgacgtgaacggtgagtttactgtgctcaagatgcatcagatcgctggcgcgtattttcgaatcggtaatcacgcgattgaatcgctcaacgggaccgatggagtatgaatgtacagcaccaaatttcgagctgtcagtcaggactatcgcttcgcactctttttccagcacggcattgaccacatcggtacgcatcatatcgcgaccggtaaatccagtttcaggttgccagccatcaataccaataaatgctttgctgaaatgcacctgttggatgcactggcgtgtcaaagggccaaccatactttcgctttttttctgatacacgccaccgagcaaaataacttcacaaggcgcgtctttcagcaaatgcgcgatgtagctgctgaccgtgatgatagtgacatttttcttctgctcgcccagagtccgggcgagtagggcattgctgctgccattttcgataaagatggtttcgcccggttgaaccagcgacgcggcaaactcggcgagttcacgcttcagcgtatagttgctcatcatacgggtttcgacgtcatcactatcaagcgaaacagcaaagccatgtgcacggcggaggtaactcagtttttcgagtgtgttgagatcctggcgaatggtaacttcagaaactccagtggcttttgccagatcggttacgctaacctgaccctggtcaatgaccatctgtagaatagtttgttgtcgggaattcatcgctgtaattcttataacgttataatacttaataaaaaaatactgacgcgccgggcatcctcaaataggaaaacctgaaggcacgattgttaaatctcccacggtgccttcgggatgtctggcgtagattcagcaacctggcgcaagagttctgctttaagtatctcgagattatggatcgcagagtggtaatcgcctgccacaaggatatctaacacaatatcaatacgttcggcaacgcgctgggcatcaaattcagacatcaaggacatccttatagcaaaagggggaaaatgaataatgcaaaaattgccgctaaaagagaagtgtttaacagcaacggctaattatcatccaggaatacgatatataatgacgggatatagcgctaagtatatatattcatctacttatgcgcgcttcagatagcgtttataccagcgttcgaaggcgacggcgggcatcggtttggcaaacaaaaatccttgccgctcattgatcccgttcttggttaaaaaagcatcttcctttgcactctctacaccttcggcgatcacctgaagattcaatgcctgggccacagcgacgatcgcccggaccagtgactgcgagacaggttgtttgtgaatatctcgaacaaaaacctggtcaagtttgatggcatcgatcggaaagcgcgccagttgcgaaagtgaagagtagccggtaccaaaatcatccagatgcacttgcgcacctagttggctaaattgttgaataacagacagtgccagttcatcattctcaatcagacaactctctgtcagttcaacatctatagggcagtattcaaaattgagttcctggagaacctgtttcagggcggtgaaaatggtttgatcggcgagctgacgtgcagaaatatttaccgccactcgcaggtttatgcctttatcccgccactttgccacctggcgtacgacatcgagaatcacccaacggcctaaaggcacaattagccctgactcttcggcgtaggaaatgaagtccaacggtggaatcaacccacgttcaggtgactgccaacgtactagtgcttccagactgcgcacttcgccacgccaggtgattttcggttgatagtgaataaccaactgatcgttttccagtgctttacgcaagttggtatccagccagagatattcaaatacccgttgattcatttctggggtaaaaacgcaaaattgtcctcgtccgccttccttcgctgtgtacattgctgtgtcggcgtgacgaataatagccgtgctgtctgaaccatgttcgggagagagtgcaatacctactgaacagctggtataaacttcaattaaaccaatgcgaaaggggagccgtaagcgggtcaaaattcgtgatgccattgcttccagcgcgctttgtgaggtgttggatgccagtaccagaaactcatccccacctggacgcgccaacacctggtcatgttcgagacagcttaaaatagccaatgacacgtcgcgtaataactggtcaccaaacaaatgcccataggcgtcgttgacctttttgaaattatccaaatcaagatacacaaccccaactttattgttatctgcatgattaatagcgtgatcgattaaatcctgcattgcgttacgattcggcagtccggtgatactgtcggtatttgccagaatacgcagtcgctcctgagcgcggcgctcttcggtaatgtcggtgccggaacagattaaaaaaatctcgtttttgccactgccgctgtggacaaatttattgcgaaacagaaacagccgctggcctttacatgttggtatccacagttcgacttcatatgcattgccgcttcgaaaaaatacacggttattgcgcctggatgccgcagcttcacgacggctcataaacagtttaaacacgctttgcccaatgacgtcgtgttctttcaaccctgtgtaatcttcacataaccgattgaagcgttggatattcccccggctgtcgagaatcactattgcggaatgtgcttcagaaactacctgctcagcaaaggaaagcccgtgtgataaatcacgagcaaccgccggtgtgtcatgccatgcagacgcgttgccagcccattcccgtttattgatttttcgtcctaccagatgcacagaaagatcgctttcatcgacggtcagactcatcatcaggctggaggtgatgaccgtcatttccctgatgcgagcagcctgttcggcagataactgcaatgtacgatcaggttctgtggtttcggtggtagaaaagcgcaaaacatcgctgctttccgtcaaccgccagtatggattgtgcgatccgagaaagttgtacaacgttgtggactccctaacggttttcatgatgcatatcctccggttaacagcggagtccgcggttaaataaaaggaacaacatgacttacatgaaattaacggcggctaaacgcattgttttttttatatatttatttgtaatccagttttggaaaaacgccagttttcaaacgaaagtcagttaaaaaatctgcctggatataacgaaggtagagcggggaaataaacggcccatccatgaggaatgggccgtgaaaggagattacgcgaccgggcgcgcaataatgctgcgggtttccatgcggacttcggcaatagtgacgtcaataacgtcagtcactttgtaaaccgtttcacctttaatttgtacagtgccgttttcctggctgcaaaccagttcatcgcgcacagcgtgtaagaaaggtgccggaataaaggcgatagcgccgttatcaaccaaacgaacacgcatgccgccacggctgatatcgacaatttccgctgcgaaacgggtgtcggtcccggctttgtctttcaggaagcgtgcgtataaccagtcaccaacatcacgttctgccatccggttgagacggcgacgctcggccatttggacagtgatttcatcctgtgggcgcgtcgcagtttcgcctttgataaccgctttcagcagacggtggttgatcatgtcgccatatttacggatcggcgaagtccaggtggcgtatgcttccagaccgaggccaaagtgaggaccgggttcagtgctaatttcagcaaatgactggaagcgacgaatgcggctgtcgaggaaaccagttggttgcgcgtccagttcacgacgcagtttgcagaaaccgtccagcgtgagcacttcttcggcatcgacatgcagaccgtgcgttttcagcaacgctgccagcgcgtcggcattcgccggatcaaagcccatatgcacgttatagatgccaaaaccgagcttatcgcgcagtacgcgggccgcacaaatgttagcggcaatcatcgcttcttcgacgatacggttggcaatgcgacgaggctcggcgacgatatccagcacttcacctttttcaccgagaataaagcggtaatccgggcgatctttaaacaccagtgcgtggttatgacgccactcgccgcggcgttggcaaatttgcgctagcaaacggacttgttcggcaattgcttcactttcaggctgccagtcaccggtattttccagccagtcagaaacctggtcatacaccagctttgctttggattcgatggtggcggcaaagaattcgatattatcttcaatggtgccatcagcggagagcgtcatgcggcatgccagtaccgggcggacttcattggcgcgcagtgagcagagatcgtcagaaagctcgcgaggcagcatagggatgttgaagccaggcagatagttggtgaatgcgcgaattttcgcggctttgtccagcttgctgccttcagcaatccacgcggttggatcggcaatcgccacaatcagctgaagtttgtcatccggcaacgccttagcgaaaagggcgtcatccatatcttctgtgctggcactgtcgatggtgacaaaatccagcgcggtcagatcttcacgaaccagaccttcatcgagcatttcggtagcgacgccgtctggtgcttctttttccagattatggcgtgcaagggtaacccaccacggtacaaagtgatcgtcaccaaaagtgatgtattgtgtcagttctgcatagaaagaacgatcgcctttcagcggatgacggcgcatttcggcaaccgcccagtcgccttctttaaactcgtggttcaggccacgggctgcgcggcaaggaatggcgtcttttaagagtggatgatcaggaacgatggccagacggtcatttttgccctgaaccttacccacgaaacgagtcaggaacggttcaaccagttcttctggctctgcggattcacgttctttttcactgtggatcaccgcgataattcggtcgccatgcatgacttttttcatctgcggcggcggaatgaaataacttttttgcgcgtcgacttccaggaagccaaagcctttttctgtggcttttaccaccccttcagcgcgtggcgtctgggaatgcagttgctgtttaagctgcgctagcagcgggttgtcctgaaacataattgtctattttggtggccattagagcggctgacagttttacgcgaatctgtctgacgcggcaaggttaatatgtctcacccaacgcgatttttaagcgatttatccagccacacagcccgctccataccagcagattaataatctgcgttgatgatttttcgtgttcgagtaaagggctgaactgggcggcgctaaagcgatcgggtgctcgggtcagccattgtatcgcctgaacggtagcgcgctcaacagaatgacggtcagcccattggttaatttcattttcgcccttgcgcataagggtgctgatttttttatattcatttgatgaatccatacaggtggcaaaacaagcaggactgccatttatacgcgcgcataacaacgccgcaagctgattatccggctgtgtattgccccgtgtgctgtttaacaacttttcgagaagggaaagtgaaatagggtggagagagagtatttcggccagttggcaaagttctgcagttgaactttttgtgtgctcttcaggtagtttttccacctcatagctgcttcgccagcgtaatgattcatcagcaaacagtgacgcgtcggcgtagttttgtatctccagcccgggtaaccagcgtaccggatgcccgagataagcctgaaatgtcgcaattgtccgcgcctgaaagccaataaaaccaatgatttggctaatgatcacacagtcccaggcagtaagaccgacgtcattcagatgctggcgcgatcggttgtcgataatagaaggcgagctagccagttggcgggcatattgcgtgatttgtgccaaccgatgattactttccctggtggaatcaggcccggggagcggcgtaagtcgcgccgaatagtagttacataaccgctggacgccgcaaacctgagcaaccgtcagggccgtcgacaagcgttcataagcggtgaaggtctgtgaacgggtcacggtaagctggtcagggaacaaatccactgcaagaacacgcgcagggtccagccatgaaaggaagggggccagcgtttctttttcaaggatcacgtcgagtagaaagggatcgctgacctttgcggcttccgggaccagaggcagaacgtcatactccgtagtactggattgcgtttcatgataccagtggcttttgccggtgatgtggcgttgttccatgggcgctccttggtcgtaaaggaaatcgttatcctgacgcaaggcgggaaggggagaaagacggatcggcgataacaaatatcagaaaggtataacagagataacgggcggcagaacgccgcccatctttaccaacagaacgattatttcagttcgagttcgttcattgcagcaatgctgaaaccgccgtcaacgtggaccacttcaccggagataccggcagagagatcggagcacaggaatgccgcagagttacccacatcttcaatagtaacggtacggcgaatcggggtaacggcttcgcaatgagccagcattttgcggaagtctttgataccggaggccgccagagtacggatcggaccagcagagatggcgttaacacgcacaccttccggacccatcgcgttcgccatatagcgcacgttcgcttccagagacgcttttgccagacccataacgttgtagttcgggatagcgcgctcagcgccaaggtaggaaagggtcagcagggcagaacccggattcagcatggagcggcaagcttttgccattgcaacgaagctgtaggagctgatgtcgtgggcaattttgaagccttcacgggtaacggcgttaacatagtcaccatccagctgatcgccaggtgcaaaaccaatagagtgtacgaaaccgtcaaatttcggccaaactttccccagttcagcgaacatggtgtcgatgctggcatcttctgcaacatcgcactgcagaacgatgtcagaacccaattgagcggcaaattcttctacgcggcctttcagtttgtcgttctggtaggtgaatgccagttcagctccttcgcggtgcatcgcctgagcgataccgtaggcgatggatagtttgctggcaacaccggttaccagaatgcgcttaccggaaagaaaacccatagctttaatccttattgttgatgcttgttgtgcctgaaaatcaggcgattcgtcgttttagtaaacagtacgaacagataaacggttattataatcaaccaggctgtgagtagctatagttgccaggtccgaccggagcaggctgcggcagggggggcgcttttcccctcaccctaaccctctccccagaggggcgaggggaccgtattgtgcaaatattgttaccccagcaacaaacaggctcatacagcccctaaccctttcatggcgatggctgggacggttcagaccttgccgaatattctccagcaccgtctccatgttttcaccacaacagctattcggctcggtctgccccctcgctctttcagggagagggtgaccggcggttcagttcctgcagaatattctccagcaccgtctcctcattacaatcaatctcgttattccagaaacgcagcacggtccagccctgcgactcaagccagctagtgcgcctggaatcataggcaactgctaaatcatgctgcccaccatccagctcaacgactacacgcgccgagcagcaagcaaaatcgagaatgtagctccccactggatgttgacggcgaaatttgaaatcactaaaacgtcggctgcgaagatatcgccagagctttcgttcctgcaaagtgagattgcgtcttaaatcacgcgcatttgatttaattttatctatcacctcattctgacaagatttaatcttttgtcagaatgaggtgaataatctggaaggaggattcagaaaattagcgatctttacgccacgcatccgccgtcaatgcctcgccaaaatgaccggcaatcagccgtttggtgagttcatgcagcggcgatgccagcacatccgcggtgctgcctcgctcgacaacctcgccctgatgcatcaccagcacctggtcgctaatgtgcttcatcattccgatatgctgggtaacataaatatacgaaatgccctgtttttcctgtaattccagcatcagattaatcaactgcgaacgcatcgacatatccagtgaagcgagggcttcatcggcaataatgacttttgggcgcaatatcagcgcgcgcgccagacccagacgctgtttttgtccgggtgccaacatatgcggatagtaactgacgtgatccggtagcagcccaaccatacgcatcgtttcaataatctgtttgcgacgctgttccggttccaggtcggtgttcaggcgcagtggaaaatccagaatttgcgagatacgttgacggggattcaacgaggtcgaaggatcctgaaaaatcatgcgaatacgctgactgcggaaggaataatcgccaaaatgcagtggatgatcgtcaatcaataactcgccgctggtaggctctatcattcccgccagcatttttgccagcgtggatttacccgaaccattctcgccaataatcgccagtgtctggccttcacgtagcgtaaagctcaagggttttaccgcttctacggtctgacgacgaaaccagccggtccggtagcggaacgttttacttaaattacgcacttcaagcagcgtttcgatcatctcactctttctccatgttcagcgggaaatgacaggcatagagatgatttttcgcccccgtcaaacgtggcgtcacaatgcattctcgttgtgcatacgggcaacgtggccccagacgacaaccaatcggtaactgttccagcagtgggatagcgccgggcagcgtattgaggcgacttttatgcggcatcgcgctgccgaagtctggtatcgcgcggatcagcgcctgggtataaggatgatgtggcatcgtcaccaactccttactcggcgcggtttccactgtttgaccgcagtaaagcacgttaattttatccgcccattggctaagcatttgtaagtcatggctgataagcaaaatagtggtattgctgttttggttgagacgcgtcagcaggcgaaagatttgcgcctgggttgttggctccattgagttggtcggttcgtcagcaatcagcagacgcggttgattcgccagtgcaatggctatcatcactttctgacattcaccttcggtcaactcatagggaaaactgcgcatcgcatctttgtgatctttaatccccacgcggtgcagcagttcaatggcacggcgtttgcgccagccaaaacgctgccaccaacggcctttataggtccaggctgggatgttttgcatcaactggcggcccacacgttctgaagggtcaagacacgactgcggttcctggaaaatcatcgacacgttatggccaaccagtttgcgccgttcgcgtgcggagagacgcagcaaatcgatatcatcaaaacgcatacggtcagcagtaacacgccagttatctttattcaccccacaaatcgctttcgcaatcaaactcttgccggaaccggattcaccaacaagaccgcggatttcaccttcggttaaggtcatacttacccggtcgacggctttaacccactcatcaccggttttaaattcaatggtcaggttacgaatatcgagtaatggcattattccacccccgcaataatcgcacgacgaacgccatcgccaaggaggttaaccaacaacacgctaatcataattgccgcacctggcagcatgacagtccacggggcgacataaatcagttccagcgcatcaccgagcatcgctccccattcaggcgaggggagttgtgcgccgagatcgagaaagcccagcgcggcgatatcgagaattgccatcgacagtgcgcgggtgatctcggtgaccagcccggcggtgatgtttggcatcacagcaaaccagagaatattcagcgttgatgcgccatccagacgggcggcgataacgtactctttttccagttcgtcatgcaccatgctgtaaatcgaacgtaccatacgcggcagcaatgccagccagacagcaaacatagcgtgggacaaactcggtccggcaaacgctacaacgataattgccaacagcagcgaagggatcgccagtaaggtatccagaatatggttaagcaccgctgagcggaggccgtgtgtcgccccggcgaaggtgcccagtaccaggccacagatcgtcgcggcaagcgtcaccacaaatgcgccacccacggttggcgcagctccgctcagtaaacggcttaaaacatcgcgtccgaggtcgtcagtccccaggaagaaagaaacttcgccatagcgcgaccatgacggcggcaataattgataaccgagaaattgctggtcgatgccgtaaggcgcaaaccagccgccaaaaatacacagtacagccagccccgcgcagccgtacaggccgaccatcgcagaggcgtcactataaaatttgcgccaggcggtacgcagcgtgcccggcgggcgcttttcgctgtatacgctatcgtaaggcataccattccttatgtttcagagggttagccatggcacccaaaatatcagaaatcacgttaacaataatgaccagtgagccacacaccatcactccggcggaaatggctgcgtaatcctgctggcggatggcgttaattaaccagcgccctaaacccggccagctaaaaaccatttcggtgatcatcgccagcgtcagcatggtggaaaactgtaagcccaggcgaggaataaccggcggtaacgcgttatgcagaacgtggcgacgcaaaatagtaaagcgcgacaaaccgcgggtcgccgccgcttttacatagttctggtcatacacttcgatagtgctgatacgcatcaggcggatcacttcagttgttggcgcaaccgacagggtgatcacgggcaatatcatatggcggattgcgctcatgatcatttcatcccgccatggtgagtccgaaagccaggcatcaatcaacgcaaaaccggtaatcggtttcacttcgtagagcagatcgaaacgccctgaaacgggcaaccaacctagcgtgagtgaacaaaacagcgtcaacagaagcgccagccagaacaccgggattgaaaagcccagtaaggcgatggcgttgatcaagttatcctgccacttatggcgcgtaatcccggcaatcatccccacggggatgccaacaatcagcgcaaaaccgaaggcgaggatgcacagttccatcgtcgccgggaagacctcttttaactgttcggcaatcggttgaccgttaatgctggaaacaccaaaatcccagtggatcaggccgttaaaccagaacacccaggcattccacagtgacgcgccttgtaacggcgcatgaggggtgaaatagctcaagctgaagccaacgaaggtcagcaggaacaaggtgacaatcaataacaaaatgcggcgtaaggtgaagataatcatggttttttcacctcatcctgtttctcgcgatacaccccagcaaaggaggcgttaccaaacgggctaagtaccagacctttgatatcgtaccgataggcctgcaaacgcaatgacgacgccagcggcaaaatgggcaattcctgcgccaaaatactctgcgcttcgtcataggcttcaatacgcgccgccagctgctgcgaagagagcgccttacgcaatacgctgtcgaatttcggatcgcaccagtgggcgaggttggtctgcgaatgaattgccgcgcagctcagtaacggacggaagaaactgtccgggtcgttactgtccgtcgcccaaccggataacgtcagatcatggctcatatccatcaaccgcgcctcctgaaagcgaccttctaccggcacaatcaccacttttacgccaacctgcgccatatccgcctgaatcagttcggcagttttcagtggactggggttccacgcctgcgaacgtgtgggcacccacagtttcagcgttaaattttccagccccaacgacttcaactgttcgcgcgatttcgccggattgtattcagtaattttagcctcgttgtcataggcccacgaggcgcgcggtaaaatagaggccgccgtttcagccgtaccataatagatggattgcatcaggcgctggttattaatcgccagtgccagcgcatggcggacagcgggattatttagcggcggtttggcggtgttaaatgccagataggcgacgttcatcccaggacgcagcgttaaacgcaagcgcgggtcgtcacgcaaaatggatagctggctggcagcaggccaggccagaacgtcgcattccccggtcaggagtttcgacagacgtccggtgccgccggagcctaaatccaccactacctgcggcattaacggtttaccgcgccagaagtcatcatgacgttgtaggcgaataaattgcccggcgcggtattccgacaactgatacggaccggtgccgaccggttgacggtcgagttgctcctggcgatcttctttctctaacttccgggcatattctgccgacatgaccgaagcataatgggttgcgaggtgccacaaaaaagaagcatccggctgggcgagtcggaactcaacggtatgattatccagtttgcggacgcttttcacgttatcggcaaattgcaggctgtcgaagtaggggaagttgctgccgttgacgttatgccacgggttgttgcggtcaaaaattcgctggaaggtaaacaccacatcgtcggcattcattttacgagtgggagtaaaccagtcggttttttgaaacggaacatcgcgacgcaggtggaagcgataggtcgcgccgttgtcgagtacttcccagctttcggcaagttccggcatcaggcgataggtatagggatcgacatccagcagtcgatcataaaactgggcggcaagggtatcgacaattaacccactgctcgctttggatgggttaaaggtgttgacttgcccgctgacgcaatagacaaaaccgctgtcgcggatatcagcatgcgggggagattcaggcgcggcgattgcctgaccactcacaagtccagcaatcaccaaaagagacgataatacctggcgcataatattaagggattttatgtaaagaggctatcttactaatatttaatgacatttgccattaccgtttgtgttcaggggtcgtaatgagggccgtgtggttggtcgttgaacaggtgacgtcgccatctgttcaacattcgtacccgtgatttctctataactataactcacagaacaacttagcgaggagcagagcggtacgatcgtgagaaacccattaaagcacgctgcagtgcgtgtcattgttagccagatgcggcgtgaacgctttatccggacaacgatactgaccgatcgtctgcaattaaatcattactcattaccccattgattcaaaaactctgcgatctcatcaatgcgtacgggattaatccccgcttcagcagccatttcatgttgggcttcttcgctgatctcttcattgttcatcaaacgggtgagcagtaactggaagtagtgggccagcggtgtgcgttcagcctctgcgacaggctctgcgcattcggtcgcgtactcatcggcaatatcaaaatattttagcgggatatcgtggttcattatttgcccctggggttaatgcgctaagcataagggcggatgatagcactcgtgatccgggtcatacatctttttatagttaatggcgcggcgcgttaccctcaggcaggataatgcgccgcgcatccgactattacgtttcactcaccggcgttctgtcaccatcatacaacggcactttgcgatagcggcggatcagataccataaatatgcgccgcctaacgaagcccataccagaccgagtgtcagtgacgttgactcgaggttaacccacagcacacccaccgtcagcgcgccaaccagcggcatcagcaaatagtggaagtgatccttccagcttttattcattcctttacgccgccagaaatgattaaacaccgacagattcacgaaggtaaacgccaccagagcaccgaagttaattaacgctgtggcggtaactaaatcgaagaacagcgccgacaacgcgacaatcccgaccataatgacgttgagtgccggagtccgccattttgggtgcacatagccaaacacgcgctccggaaacacattgtcacgccccatcacatacagcagacgcgacacgctggcatgtgaagccaggccagaggctaacgtgttcacaaacgtggtgcagaggaaaatcgactggaagagcttgccgccgacgtacagcgcaatttcaggcagtgcggcatccggatctttaaagcggctgatatcgggaaagaacagctgcataaagaacgacgccgcgataaagataacgccaccgtagaccgccgtcaggaagatggctttcgggatcacgcgtgcggcgtccggcgtctcttccgaaagcgtggtcaccgcatcgaaaccgaggaaggagaaacagacaatcgtcgccccggtaataatcgggatcaggtgcgcgttctcgctgataaacggctgaagtgaccagacggtgccaacgccttctcctttatgcagtccctgaactaccaggaagataaacaccaccatgatggagatttgcaccagtacaaacagggtattgaagttagcgaccaggttgacgctcttcagattcgcggcggttaaaatggcgacgaaggttaccacccacacccacggcggcacttccgggaagagggcggagagatagattttcgccaacaagacgttaatcatcggcaaaaagagataatccagcagcgatgaccagccgaccataaatccgacgtgcgggttaatagacttttgcgcgtaggtataggccgaaccggcctccggaaactggcgaaccagtttgccgtagctgatagcggtaaacagcacacccgccagcgccagcaaataggacgccggaacgtgaccgtcgctaatgccggagacaataccaaaagtatcaaatacggtcatcggcgtgaggtaggccagacccatcatcaccacctgccacaatttcagtgattttcgcagacgggttttgccgggttgcgcagcaatattcagtggtgaattaatagccataattgctgcctcccctgcgtaataaggtttgcggtcgtgtcgacctgaaatcaaacctgtttagcaagggaagcaaagggggcggagtccagtcagtagcaggaggggcgcatacgcagcctccctcgccatgcggggatttaatcatcggcatcatctcatttcctcgtcacagtcttaatcgttaacggaagcccgttgccgcccgcgctccataacgcgacatccgggaaatgtctggattaccagcaaatgtcaggcctggctccgctcaggccgatgaaacaaccccgcaaggggtattacgcgtttttcaacatccactcaatttctgtttctgtgatgaggcgctcaaactgcaacagctcatcatttttacaggcgtgatagacatggcagaagcgttcgcctaaatagcggcgcaggtgatcattctcgataaactcacccagggcatcgctctggcgaatcggaaagggtaagccttcctgttccagcccgttgccttcgacttcttcctgcaacggcagctcgttatcaaggccatgcaaaataccggcaaaaatcgctgccatcaccagatatgggttggcatcggcacccgccacgcgatattccacgcggtgattatgacggtcgccgcacggaatacgcagggcgacggtgcggttgttatggccccacgacgcctgcgtcggcacatacattcccggctggaagcggcgatacgagttcacgtttggtgccagcaacgccatcgacgacggcatcaggtcaatcatcccggcgagcatctttttcagcagcggcgaatcttcgccttccgcgtcagaaagcacgttctcgccacgattattttgcatactgatatggatatgcattccgctgcccgcgtgctcttcatacggcttcgccataaaagtggcgtgcatcttatgcttttctgccatcagacgcaccaggcgttttagtgccagcgcatcatcgcaggcttccagcacgttatcagtatggtaaaggttgatttcaaactgacccggcgaggcctcagcgaccgcgccatctgccggaatcagctgtaactgcgccagttcatcaatatcattgagcacgtcggcgaagtggttgaggttatcaacggagtaaacctggctttgtgtattgcggtcatcggtgccaggcgcgcagggcggttgcagatacccttcagcgtcgcgctggcgatccagtaaatagaactccagctctaccgctacgaccgggaacaatccgcgctggcgcagctgctgccacaggcggttaagaacgttccgcggctcaacgtcaaagggagcgccatcttcatcgaccatggtcaggagcatctgaccgataaactctggatcggcggcagaaggagttaaggaaccgagaacaggaacacaggtacgatccggctcgcccatttcctgacccagacctgcttcttctactacgttgcccagaatatccattgcaaataccgaggccgggaaataacaccctttctcgagcttcttcaggcttgaaacaggaatacgctttccacggaagcaaccatttaaatcggtaagtaaaacatcaacatattgcgtattcgggtagcgctccaggtagcgtttcacttcctgcgtaaaggcgctaccccgcctctcttctgactgctgaacaaagttctctacttcaacgatattggtttccatgattcttcgcctttggtttgttttccgctcgttatcaaagcgtaaaatataatgaccaccattcgaatctgtatgcaaactaaatgtttgtcaaatgttaaattgagtttgcaaaaatgaaaacccactgctagattgaaaaaatattgaacataaaggtcatttaaagcgcagtaatggcgataatttagtccactttgtgagattgaatatggaaaatataatgaacaatccggttatcggtgtcgtaatgtgcaggaacaggcttaagggtcatgcgacccagactctgcaagaaaagtacctgaatgccatcatccatgcaggcggcttgcctattgcgctaccacatgcgctggcggaaccgtcattacttgaacaacttttgccgaaactcgatggcatttatcttcctggtagtcccagcaatgtgcagccgcacctatatggtgaaaacggcgatgagcctgacgccgatcccgggcgtgatcttctgagcatggcgataattaatgccgcactcgaaaggcgcatccccattttcgccatctgccggggtttacaagaactggtggtggcaaccggtggttcgttgcatcgcaagctgtgcgaacagcctgaattgctggaacatcgggaagatcccgaactgccggtggaacagcaatatgcaccgtcgcatgaagttcaggttgaagaggggggattactgtctgcgttgttacctgaatgtagcaacttttgggtaaactctctacatggacaaggggcgaaggtcgttagcccacggttgcgtgttgaagctcgctcgccggatggcttagttgaggcggttagcgtcatcaatcatccttttgcgctgggcgtacagtggcacccggaatggaacagtagcgagtacgcgctttcgcgtatattgttcgagggctttatcaccgcttgtcagcaccatatcgctgaaaaacagcgactctgaccactacagtttaaggaaatgcaaatatgagtgatgagggactggcgccaggaaaacgcttgtcggaaatccgccagcagcaggggctttcacaacgtcgtgccgccgaactctccgggctgactcacagtgctatcagtacgatagaacaagataaagtcagccctgccatcagtacgctgcaaaagctgctgaaggtgtatggtctgtcactctcggaattcttttccgagccggaaaaacctgatgagccgcaggtcgtcattaatcaggacgacttaattgagatgggtagtcagggtgtgtcaatgaagctggttcataacggtaacccgaatcgcacgctggcgatgatctttgaaacgtaccagccgggcacaaccactggggaaagaattaagcatcagggtgaggaaataggcactgtactggaaggtgaaattgttctgacgattaatggtcaggattaccacctcgtcgcggggcaaagttatgccattaataccggcatcccgcacagtttcagtaatacgtcggcaggtatttgccgaattatcagcgcccatacgcccaccacgttttaatctttttgttctgtaagccgggtaagcgcaatgcgcccggcaatctatacacaaaatcattcaagttgcatcaaggcggcaagtgagcgaatcccgatgagcttactcaggtaagtgattcgggggagcgaacgcagccaaggcagaggcggcttgaaggatgaagtgtatataaagaatgtcgccagaaataaacgggcatacggcccggggatctctgcgccctgacgttcacaaactgcatatatctgatagacgtgaaacaggagtcataatgaattttcatcatctggcttactggcaggataaagcgttaagtctcgccattgaaaaccgcttatttattaacggtgaatatactgctgcggcggaaaatgaaacctttgaaaccgttgatccggtcacccaggcaccgctggcgaaaattgcccgcggcaagagcgtcgatatcgaccgtgcgatgagcgcagcacgcggcgtatttgaacgcggcgactggtcactctcttctccggctaaacgtaaagcggtactgaataaactcgccgatttaatggaagcccacgccgaagagctggcactgctggaaactctcgacaccggcaaaccgattcgtcacagtctgcgtgatgatattcccggcgcggcgcgcgccattcgctggtacgccgaagcgatcgacaaagtgtatggcgaagtggcgaccaccagtagccatgagctggcgatgatcgtgcgtgaaccggtcggcgtgattgccgccatcgtgccgtggaacttcccgctgttgctgacttgctggaaactcggcccggcgctggcggcgggaaacagcgtgattctaaaaccgtctgaaaaatcaccgctcagtgcgattcgtctcgcggggctggcgaaagaagcaggcttgccggatggtgtgttgaacgtggtgacgggttttggtcatgaagccgggcaggcgctgtcgcgtcataacgatatcgacgccattgcctttaccggttcaacccgtaccgggaaacagctgctgaaagatgcgggcgacagcaacatgaaacgcgtctggctggaagcgggcggcaaaagcgccaacatcgttttcgctgactgcccggatttgcaacaggcggcaagcgccaccgcagcaggcattttctacaaccagggacaggtgtgcatcgccggaacgcgcctgttgctggaagagagcatcgccgatgaattcttagccctgttaaaacagcaggcgcaaaactggcagccgggccatccacttgatcccgcaaccaccatgggcaccttaatcgactgcgcccacgccgactcggtccatagctttattcgggaaggcgaaagcaaagggcaactgttgttggatggccgtaacgccgggctggctgccgccatcggcccgaccatctttgtggatgtggacccgaatgcgtccttaagtcgcgaagagattttcggtccggtgctggtggtcacgcgtttcacatcagaagaacaggcgctacagcttgccaacgacagccagtacggccttggcgcggcggtatggacgcgcgacctctcccgcgcgcaccgcatgagccgacgcctgaaagccggttccgtcttcgtcaataactacaacgacggcgatatgaccgtgccgtttggcggctataagcagagcggcaacggtcgcgacaaatccctgcatgcccttgaaaaattcactgaactgaaaaccatctggataagcctggaggcctgaaatgaccgaacataccagcagttactacgccgccagtgcgaataaatatgcaccattcgacacgctgaatgagtcaatcacctgcgacgtttgcgtggttggcggcggctataccgggctctcctccgcgctgcatctggcggaagcgggctttgacgtagtggttctcgaagcctcacgcatcggctttggcgcaagcgggcgcaatggcggacagcttgtgaactcctacagccgcgacatcgacgtgatcgaaaaaagctacggcatggacaccgcccgtatgctcggcagcatgatgttcgaaggtggtgagatcatccgcgaacgtatcaaacgttatcagattgactgcgactaccgccccggcggcctgtttgtggcgatgaatgataaacagctcgccacacttgaagagcagaaagagaactgggaacgctacggcaataaacagctggaattgctggacgccaacgccattcgccgtgaagtagccagcgatcgctataccggtgcgctgctggatcacagcggtgggcatattcatccgctaaaccttgccattggcgaagcggacgccatccgcctcaacggcgggcgcgtgtatgaactttctgccgtgacgcagatccagcacaccacgccagccgttgtgcgaactgccaaaggtcaggtgacggcgaagtatgtgattgtcgccgggaatgcgtatctgggcgataaagtagagccggaactggcgaaacgcagcatgccgtgcggcacgcaggtgatcaccaccgaacggctgtcggaagatttagcccgttcgctgatcccgaaaaactactgtgtggaagactgtaactatctgcttgattactaccgtcttaccgccgacaaccgcctgctgtacggcggcggcgtggtctacggcgcgcgcgacccggatgacgttgagcgccttgtggtgccgaaactgctgaaaaccttcccgcagctgaagggggtgaaaattgattaccgctggacgggcaacttcctgctgaccctgtcgcgtatgccgcagtttggtcgcctcgataccaacatctattacatgcagggctacagcggccacggcgtgacctgtactcatctagccggacgtttgattgccgaactgctgcgcggcgacgccgaacgtttcgatgccttcgccaatctgccgcattacccgttccccggcgggcgcacgctgcgtgtgccgtttaccgcgatgggcgcggcgtattacagcctgcgcgatcgtctgggcgtttaatttccgattaaccgtgaagagtcaaaaggtgtgaaacatgagcaacaatgaattccatcagcgtcgtctttctgccactccgcgcggggttggcgtgatgtgtaacttcttcgcccagtcggctgaaaacgccacgctgaaggatgttgagggcaacgagtacatcgatttcgccgcaggcattgcggtgctgaataccggacatcgccaccctgatctggtcgcggcggtggagcagcaactgcaacagtttacccacaccgcgtatcagattgtgccgtatgaaagctacgtcaccctggcggagaaaatcaacgcccttgccccggtgagcgggcaggccaaaaccgcgttcttcaccaccggtgcggaagcggtggaaaacgcggtgaaaattgctcgcgcccataccggacgccctggcgtgattgcgtttagcggcggctttcacggtcgtacgtatatgaccatggcgctgaccggaaaagttgcgccgtacaaaatcggcttcggcccgttccctggttcggtgtatcacgtaccttatccgtcagatttacacggcatttcaacacaggactccctcgacgccatcgaacgcttgtttaaatcagacatcgaagcgaagcaggtggcggcgattattttcgaaccggtgcagggcgagggcggtttcaacgttgcgccaaaagagctggttgccgctattcgccgcctgtgcgacgagcacggtattgtgatgattgctgatgaagtgcaaagcggctttgcgcgtaccggtaagctgtttgccatggatcattacgccgataagccggatttaatgacgatggcgaaaagcctcgcgggcgggatgccgctttcgggcgtggtcggtaacgcgaatattatggacgcacccgcgccgggcgggcttggcggcacctacgccggtaacccgctggcggtggctgccgcgcacgcggtgctcaacattatcgacaaagaatcactctgcgaacgcgcgaatcaactgggccagcgtctcaaaaacacgttgattgatgccaaagaaagcgttccggccattgctgcggtacgcggcctggggtcgatgattgcggtagagtttaacgatccgcaaacgggcgagccgtcagcggcgattgcacagaaaatccagcaacgcgcgctggcgcaggggctgctcctgctgacctgtggcgcatacggcaacgtgattcgcttcctgtatccgctgaccatcccggatgcgcaattcgatgcggcaatgaaaattttgcaggatgcgctgagcgattaatagcccaaggcaataatgtctgatgcgctgcgcttatcaggcctgcaaacgacgtattgattatgtatgccgaataaagcattcacgccgcatccggcaagttgtattgctcaacttcgctaaatctggtgctttttcaacaacgcgcggaactgatgataagttaaccccagtaattcagccgcgcgcttctggttatatttcccttgttgcaaactgagttgcagcaactctttttcctgctgcatctgaaactcacgtaaatccagcggcagtgttggaagcgaggtggtttctgaaacggcgatagcgtcttcaggcggacgccgtttaaagggatcaataatgatgtcatcaagcggataatcgctggtgccgtggcgatacactgaacgttccaccacgtttttcaattcacgaatatttcccggccaacgataattcagcaatgtttctctggcgcgctccgtaaaccccgggaacagaggcagcttgatttcccgacacatctggatggcaaagtattctgccatcaacattatgtcgctttcgcgctcgcgcagtggtggcagttgtacaacatcaaaagccagtcggtcgagcaggtcagcgcgaaaagtgccttcattgaccatcgccgggagatcggcattcgtcgcgcataccaaccgcacattcacctgcaatggctggctgccgccaacgcgctccagttcaccgtactcaatcacgcgcaataatttctcctgcaccatcatcggtgccgtagcgagttcatcaagaaatagcgtaccgccgtcggcacgttcaaatctccctggatgacgtttttgcgcaccggtaaacgcccccgcttcgtgaccaaacagttcggaatccagcagattttcatttaacgccgcgcagttaagggaaataaacggcccttgccaacgggaggagagataatgcaggcggctggcaatcagctctttaccggtgccgcgttcgccgatgatgagcaccggtttgtccagcggtgcgagatgcgaaacctgttccagcacttcgagaaagctgttcgcctcaccaagtaaattatctttgtattctgccatgatgaaattcgccacttgttagtgtaattcgctaactcatcctggcatgttgctgttgattcttcaatcagatctttataaatcaaaaagataaaaaattggcacgcaaattgtattaacagttcagcaggacaatcctgaacgcagaaatcaagaggacaacattatgggtattttttctcgctttgccgacatcgtgaatgccaacatcaacgctctgttagagaaagcggaagatccacagaaactggttcgtctgatgatccaggagatggaagatacactggttgaagtacgttctacttcggcgcgcgcgttggcagaaaagaaacagctgactcgccgtattgaacaagcgtcggcgcgtgaggttgaatggcaggaaaaagccgaactggcgctgctgaaagagagagaggatctggcacgtgcagcgttaattgaaaaacagaaactgaccgatctgattaagtccctggaacatgaagtgacgctggtggacgatacgctggcacgcatgaagaaagagattggcgagctggaaaacaaattgagcgaaacacgcgctcgccagcaggcattgatgttacgtcatcaggcggcaaactcgtcgcgcgatgtgcgtcgtcagctggacagtggcaaactggatgaagcaatggctcgtttcgaatctttcgaacgtcgtattgaccagatggaagcggaagcagaaagccacagcttcggtaaacaaaaatcgctggacgatcagtttgccgaactgaaagccgatgatgcaatcagcgaacaactggcacaattaaaagccaaaatgaagcaagacaatcaataataacatccaggcggcgtccgaacgcgccgccgctcatcgtctaaggagtacttatgagcgcgctatttctggctattccgttaaccatttttgtgctgtttgttttaccgatctggttatggctgcattacagcaatcgttctggtcgcagtgaattgtcgcaaagtgagcagcagcgattagcgcaactggctgatgaagcaaaacggatgcgcgaacgtattcaggcgctggaatctattcttgatgcagaacatccgaactggagggatcgctaatggcgggcattaatctcaataaaaaattatggcgtattccacagcagggcatggtccgcggcgtctgcgccgggattgccaactattttgatgtaccggtaaaactggtgcgtatcctggtggtgctgtcgattttcttcggtctggcgctgtttaccctggttgcttacatcattttgtcatttgcgcttgatccaatgccggacaacatggcctttggtgagcagctaccttccagcagcgaattgctggatgaagtcgaccgtgaactggcggcaagtgaaacgcgtttacgcgagatggaacgttatgtcacttccgatactttcacgttacgtagccgtttccgtcaactgtgaggaaagttatgaatactcgctggcaacaggccgggcaaaaggtaaagcctggtttcaaattagcaggcaagctggtacttcttaccgcactgcgctatggcccggtgggtgtggcgggctgggcgataaaatcagttgctcgccgaccgctgaaaatgttgctggctgtggcgctggaaccgctgttaagtcgggctgctaataaactggcacagcgttataaaaggtgaggggagtttcgcaaaaattgttaaatctcaggcgtataatggatggcaattttcatccatagaaggacgcttacatgtttaaaaaaggcttacttgctctggcactggtgttttcactgcccgttttcgccgctgaacactggatcgatgttcgtgttccagagcagtatcagcaagagcacgttcagggggccatcaatattcccctgaaggaagtgaaagagcgcattgccaccgccgttccggataaaaacgacaccgtgaaagtgtattgcaatgccggacgccagtcagggcaagcaaaagagatccttagcgagatgggatatacccacgttgagaacgccggtggcctgaaagacatcgcaatgccgaaggtcaaaggttaaaagaattcaccatgagcggcgcttatgcgccgtttttttttctgtcacaccttatttacatccccatagattatttgcgtcagctcacaaatacgctttttccctggtaaaaaatgatttcctgcgtgactaaaacccttgtgctcaattgacagtttattttctgcggagtagtctctcgtttcatgggaccgctaccacggaaaggcaacatgaaacagaaaattacggattacctggacgaaatctacggtggaacatttaccgcaactcatttacagaaacttgtaacgcgtcttgagagtgcgaaacgattaattacacagcgacgtaaaaacactgggatgaaagtgatgtcgtgttaattacctatgccgatcaatttcacagcaatgatttaaaaccattacccacatttaatcagttttaccatcaatggctgcaaagcattttttcacatgttcatttgttgccgttttatccatggtcatctgatgatggcttttcggtaattgattatcatcaggtcgccagtgaagcgggggagtggcaggatattcagcaactcggtgaatgcagtcatttaatgtttgattttgtctgcaaccatatgtcggcaaaaagtgaatggtttaaaaactatttacaacagcatccaggttttgaagatttttttattgccgttgacccgcaaaccgatctcagcgccgtcactcgcccgcgtgcgttaccgttattaacgccattccagatgcgcgatcattcaacgcgccatttatggaccacctttagtgacgatcaaattgacctgaattaccgtagccctgaagtgttgctggcgatggtggatgttttactctgttaccttgcgaaaggtgctgagtatgtccgcctggatgccgttggctttatgtggaaagagccgggaacaagctgcatccatctggaaaaaacacatctgattatcaaactgttacggtcgattattgataacgttgcgccaggtacagtgatcattaccgagaccaatgttccgcataaagacaacattgcttactttggcgcaggcgatgacgaagcacatatggtgtaccagttctcgctgccgccactggtgctgcatgcggtgcaaaaacagaacgttgaggcgctttgtgcgtgggcgcaaaacctgacactaccttccagcaacaccacctggtttaacttcctcgcctctcacgatggcatcgggctaaacccgctacggggcttgttgcctgaaagcgaaatattagagctggtcgaggcgttacagcaggaaggtgcattagtaaactggaaaaataatcccgacggtacacgcagtccgtatgaaataaatgtgacctatatggatgcgttaagccgccgtgagagtagcgatgaagaacgttgcgccaggtttatccttgcccatgcgattttgttaagtttccccggtgtgccagcgatatatattcaaagtattcttggctcgcgtaatgattacgcaggtgtcgaaaaaatcggatataaccgtgcgattaaccgtaaaaaatatcacagtaaagagataacccgagaactgaacgatgaagctacattaaggcatgcggtatatcatgagttgtcgcgtttaattacacttcgtcgcagccataacgagtttcatccggataataattttaccattgatacgattaattcatccgtaatgcgtattcaaagaagtaacgctgatggtaattgtctgactggattgtttaatgtcagtaaaaatattcagcatgtaaatattactaatctgcatggtcgggatctgattagtgaagttgatatattgggtaatgaaataacgctgcgcccctggcaggttatgtggattaaataaaaaggaacatctcatgattaaatcaaaaatcgtgctgttatcagcactggtttcatgcgccctgatttcaggctgtaaagaagaaaataaaacgaatgtatccatcgaatttatgcattcttcggtggagcaggagcgccaggccgttatcagtaaattgattgcccgttttgaaaaagaaaaccctggcatcaccgttaagcaagtgcccgtggaagaagatgcctataacactaaagtcattactctttcacgtagcggttcgctgccggaagtgatcgaaaccagccatgactacgccaaagtgatggacaaagagcagcttatcgatcgcaaagcggttgccacagtcatcagcaacgttggtgaaggcgcgttttacgatggcgtactgcgtattgtgcgtaccgaagatggtagcgcatggaccggtgttcctgtcagcgcctggattggcggtatctggtatcgcaaagatgtgctggcaaaagcggggcttgaggagccgaaaaactggcaacagctgctggacgttgcacagaaactgaatgacccggcgaataaaaaatacggcattgcgctgcctacagcagaaagcgtgttgacggaacaatccttctcccagtttgcgttatccaaccaggctaacgtctttaacgccgaaggcaaaatcacccttgatacaccagagatgatgcaggcactgacctattaccgcgaccttgctgccaacactatgccgggttctaacgacatcatggaagtgaaagacgcctttatgaacggcaccgcgccgatggcgatttactccacctatatccttccggctgtgattaaagaaggcgacccgaaaaacgtcggtttcgtggtgccaaccgagaaaaactctgcggtctacggcatgttgacctcgctgaccattaccgccgggcaaaagaccgaagagacggaagcagcagaaaaatttgtcacctttatggagcaggcagacaacattgccgactgggtgatgatgtcgccaggtgctgcgctgccggtgaataaagcggtggtgactaccgccacctggaaagacaacgacgttattaaggcgctgggtgaactaccgaatcagctaatcggtgaactgccaaatattcaggtttttggcgcagtaggggataaaaactttacccgcatgggtgatgtgacgggttctggcgtggtgagttcaatggtgcataacgtcaccgtgggtaaagccgatctctctactacgctgcaagcgagccagaaaaaactggatgaactgatcgaacagcactaaacccaggacaggaatccgcaatgaacaggcttttttcaggtcgttccgatatgccctttgcgctgctgcttctcgcgcccagcttattactgctgggcggtctggtggcgtggccgatggtgtcgaatatcgaaatcagttttttacgtctgccgctcaatcccaacatcgagtcaacgtttgttggggtgagcaactatgtgcgtatcctctccgatcccggcttctggcattcgctgtggatgacggtctggtataccgcgctggtggtggcgggcagcaccgtgctcgggctggcggtggcgatgtttttcaaccgcgagttccgcctgcgcaaaaccgcgcgttcgctggtgatcctctcctacgtaacgccgtccatttcgctggtgttcgcctggaaatacatgttcaacaacggctacggcattgttaactacctcggcgtcgatcttctgcatctctatgagcaggcaccgctgtggttcgataatccgggcagtagctttgtgctggtggtgctgttcgccatctggcgctacttcccgtatgcctttatctcgtttctggcgattttgcagaccatcgacaaatcgctgtacgaagcggcagagatggatggcgctaatgcctggcaacggtttcgtatcgtcacgctgcccgcaattatgccggtcctggcgacggtggtgacactgcgcaccatctggatgttctacatgttcgcggatgtttatttgctgacgaccaaggtcgatattctcggtgtatatctctacaaaaccgcctttgcctttaatgatttaggaaaagcggcggcgatctcggtggtgctcttcatcattattttcgctgtcattctgctgaccaggaaacgggtgaacctcaatggcaacaaataaacgcacactcagtcgcatcggtttttactgcgagctggcgctgtttctcatcatcacgctgtttccattttttgtgatgctgatgacctcgttcaagggcgcgaaagaggcgatctcactgcatcctacgctgctgccgcagcagtggacgctggagcattacgtcgacatttttaacccgatgattttcccgtttgtcgactacttccgtaacagtctggtggtgtctgtggtttcatccgtggtggcggtattcctcggcattcttggggcttacgcgctttcccgcctgcgctttaaaggtcggatgaccatcaacgccagcttttacacggtgtatatgttctctggcattttgctggtggtgccgcttttcaaaatcatcaccgcgcttggcatttacgacactgagatggcgctgatcatcaccatggtgacgcaaactctgcccaccgccgtgtttatgctgaaaagctacttcgacaccatccccgatgagatcgaagaagcggcgatgatggatggcctcaaccgtctgcaaattatcttccgcatcaccgtgccgttggcgatgtccgggctgatatccgtgttcgtctactgctttatggtggcgtggaacgactatctgtttgcgtcgattttcctctccagcgccagcaatttcaccttaccggtgggcctgaacgcgctgttcagtacgccagattacatctggggacggatgatggcggcctcactggtgaccgcattgccggtggtgattatgtatgcgctttcggaacgttttattaagaatggtttgaccgccggtggcgtgaagggctaaagcggccagtttctttacaaggagttttaaatgaaaaagttagtagccacagcaccgcgtgttgctgcgctggttgagtatgaagatcgggcgattttagctaatgaagtgaagatccgcgtgcgtttcggcgcaccgaaacacggaacggaagtggtcgacttccgcgccgccagcccgtttattgatgaagactttaacggcgaatggcagatgttcactccgcgtccggcagatgcgccgcgcggcattgagtttggcaaattccagcttggcaacatggtggttggcgacattatcgagtgcggcagcgacgttaccgactacgcggtgggcgacagcgtatgcggctacggcccgctctccgagacggtcatcattaacgcagtgaataactacaagctgcgcaaaatgccgcaaggcagctcctggaaaaacgccgtctgctacgacccggcgcagtttgccatgagcggcgtgcgcgatgccaacgtgcgcgtaggggattttgtggtggtggtagggcttggcgcaatcggtcaaattgccatccaactggctaaacgcgctggcgcttctgtggtgattggcgtcgatcctatcgcccatcgctgtgatattgcccgtcgccacggcgcggatttctgccttaaccccatcggcactgatgtaggtaaagagatcaaaacgctgaccggcaagcagggtgccgatgtgattatcgaaaccagcggctacgccgacgcgctgcaatcggcgctccgcggtctggcttatggcggcaccatctcctatgtcgcgtttgccaagccgtttgccgaaggttttaacctcggacgcgaagcgcatttcaataacgccaaaattgtcttctctcgcgcgtgcagcgaaccgaacccggattatccgcgctggagccgcaagcgtattgaagaaacctgttgggaactgctgatgaacggttatctcaattgcgaagatttaatcgacccggtggtgacctttgccaatagcccggaaagctatatgcagtatgtcgaccagcatccggaacagagcatcaaaatgggcgttacgttttaattcaaaggaatgaaaaaaatgaaaatcggcacacagaatcaggcgttctttccggaaaacattctggagaaatttcgttatatcaaagagatgggcttcgatggttttgagattgacggcaaactgctggttaacaacatcgaagaagtcaaagcggcgatcaaagaaaccggtttaccggtgaccaccgcctgcggtggctatgacggatggattggcgactttatcgaagagcgtcgtcttaatggcttaaagcagatcgagcgcattctcgaagcgctggcagaagtgggcggtaaaggcatcgtcgttccggctgcgtggggcatgtttaccttccgcttaccgccgatgacctcgccgcgtagcctggacggcgaccgcaaaatggtgagtgattccctgcgcgtactggaacaggtcgccgcgcgtaccggaaccgtggtgtatctcgaaccgttaaaccgctatcaggatcatatgatcaacaccctcgccgatgcccgccgttacatcgtcgaaaacgatcttaaacatgtacagattatcggcgatttctatcacatgaatatcgaagaagataacctggcgcaggcgctgcatgacaaccgcgacctgctcggtcatgtgcatattgcggataaccatcgctaccagccgggcagcggcaccctggatttccacgcgctgtttgaacagctgcgcgcggataactatcagggctatgtagtgtacgaagggcgtatccgggcggaagatcctgcccaggcgtaccgtgattcgttggcctggttgcgtacctgctaagaggtctttgtgaaaagtgcaatgacaagctctccgctgcgggtcgcgataataggcgcaggccaggtggcggataaggttcatgcttcgtactactgcacccgcaacgatctggaactggtggctgtctgtgacagccgcctttcccaggcgcaggcgctggcagaaaaatacgggaatgcatccgtgtgggacgatccgcaggccatgctgctggcggtgaaacctgatgtggttagcgtctgctcacctaaccgttttcattacgaacataccctgatggcactggaagcgggctgccatgtgatgtgcgaaaaaccgcccgccatgacgccagaacaggcgcgggaaatgtgcgataccgcgcgcaaactgggcaaggtgctggcctacgactttcaccatcgttttgcgctcgatacgcaacagctgcgtgaacaggtgaccaacggcgttttgggagagatttacgttaccaccgcccgcgccctgcgtcgctgcggcgttcccggctggggtgtctttaccaataaagaactgcagggtggtggcccgctgatcgacatcggcattcatatgctggatgctgcgatgtatgtgctgggctttccggcggtgaaaagcgtgaatgcgcatagctttcaaaagatcggcacgcaaaagagctgtggtcaatttggtgagtgggatccggcaacttacagcgtcgaagattcgctgtttggcaccattgaatttcataacggcggcattctgtggctggaaacgtcatttgcactcaacatccgcgaacagtcgattatgaacgtcagcttttgtggtgataaagctggtgcgacgctgtttccagcacatatctacaccgataacaacggtgaattaatgacgctgatgcaacgggaaatggcagacgacaaccgccatttgcgcagcatggaagcctttatcaatcacgtacagggcaagcccgtgatgatagccgacgccgagcaggggtacatcatccagcaactggtggcggcgttgtatcaatccgcagaaacagggacgcgtgtggaattatgaccaggccagtaacgttatcagaaccccatttcagccagcataccctgaacaagtatgcatcgctgatggcgcaggggaacggctatcttgggcttcgcgccagccatgaagaagattacacgcgccagacgcgagggatgtatctggcggggctgtatcatcgggcgggaaaaggtgaaatcaacgaactggtgaacctgcctgatgtcgtggggatggagattgccataaatggtgaggttttctcgttatcccacgaagcctggcagcgtgagcttgactttgccagtggcgaattacgccgcaatgttggctggcgtaccagcaacggctcaggttacaccatcgccagccgtcgctttgtttcggcagaccaactgccgctcattgcgctggaaatcactattacgccactggacgccgacgcgtcagtgctgatttcaacaggcattgacgccacgcaaaccaatcacggtcgccaacatctcgacgaaacccaggtgcgggtgtttggtcagcatctgatgcaggggagctacaccacccaggatggacgcagtgatgtggccatcagctgttgctgtaaggtgagcggtgatgtgcagcaatgctataccgccaaagagcgccgtttactgcaacataccagtgcgcagcttcatgcaggcgagacaatgacgttgcaaaaactggtgtggatcgactggcgggatgacaggcaagctgctttagacgagtggggcagcgcgtcgcttcgccagcttgaaatgtgcgcgcagcagagttacgaccaacttcttgcagcatcaacagaaaactggcgtcaatggtggcagaaacgtcgtatcacggtaaatggcggcgaagcgcacgatcagcaagcgttagattatgcgctttatcatctgcgcatcatgacgcctgcccacgacgagcgcagcagcattgcggcaaaaggcttaaccggcgaaggctacaaaggccacgttttctgggatacagaagtatttttgttaccgtttcatctgtttagcgatccgacggttgcccgaagtttactgcgttatcgctggcacaacttgccaggcgcgcaggagaaagcgcgacgcaacggctggcagggcgcgctatttccgtgggaaagcgcgcgcagcggcgaagaagagacgccggaatttgccgccattaacattcgcaccgggctgcggcaaaaagtggcctcggcgcaggcggaacatcatctggtggccgatatcgcctgggcggttattcaatactggcagaccacgggggatgaaagtttcattgcgcatgaaggcatggcgctacttctggagacggcaaagttctggattagccgcgcggtgagagttaacgatcgtctggaaattcatgatgttattgggccagacgaatataccgaacatgtcaataataatgcatacaccagctatatggcccgctacaacgttcaacaggcgctgaatattgcccgccagttcggctgtagcgacgatgcgtttatccatcgcgccgaaatgttcctcaaagagctatggatgccagaaattcagcccgacggcgttttgccgcaggatgattcgtttatggctaagccggcgattaatctggcgaaatacaaagcggcggcggggaagcaaaccatactgctggattattcacgcgcagaagtgaacgagatgcagatcctcaaacaagctgatgtggtgatgctcaattacatgctgccggagcagttctcagcggcatcgtgtcttgccaatctgcaattttatgaaccgcgcactattcacgactcgtcattaagtaaagcaatccacggcattgttgccgcacgctgtggcctgctgacccaaagttatcagttctggcgcgaggggactgaaatcgatcttggtgctgatccgcatagttgtgatgatggtatccatgctgccgcaactggcgctatctggctgggggcgattcagggttttgccggggtgagcgtgcgtgacggtgaattgcatctcaatccggcgttacctgagcagtggcaacagttgtctttccctctgttctggcagggctgcgaattacaggtcactcttgacgcgcagcgtattgcgattcgaacttctgcgcccgtttcactgcgtttgaacggtcagcttataaccgtggctgaagaatctgttttctgtttgggtgattttattttgcccttcaatgggaccgctaccaaacatcaggaggatgaatgaaactgcaaggggtaattttcgatctggatggtgtaatcaccgataccgcgcatctgcatttccaggcgtggcagcagattgccgctgaaattggcatcagcattgatgcgcagtttaacgaatccctaaaagggatcagccgcgatgagtctctgcggcgcattctgcaacacgggggcaaagagggcgactttaactcgcaggagagggcgcaactggcgtatcgcaaaaatctgctctatgtccactcactacgcgagttgacggtcaacgctgttctacccggcattcgctctttgctggcagatctccgtgcacagcagatctcggttgggctggcttctgtctccctgaatgcgccgacgattttagcggcgctggagctgcgcgagtttttcaccttctgcgcggatgcttcccaacttaaaaactcgaaaccggacccggaaatctttctcgccgcctgtgcagggctgggcgtgccgccgcaggcatgtatcggcattgaagatgcgcaggcgggcattgacgccattaacgccagcggtatgcgctcggtggggatcggcgcgggcttaaccggggcgcaattactgttgccttcaacggaatcactcacctggccgcggttatcggccttctggcaaaacgtatagcaaaggaatcaacatggctcagctttcgttacaacatattcaaaaaatctacgataaccaggtgcatgtggtgaaggacttcaacctggaaattgccgataaagagttcatcgtgtttgtcggcccgtcgggctgcggtaagtcgaccaccctgcgcatgattgccgggcttgaggagatcagcggcggcgatctgttgatcgacggcaaacgaatgaatgacgttccagccaaagcacgcaatatagcgatggtgttccagaactacgcgttgtatccgcatatgacggtttacgacaacatggcgtttggtctgaagatgcaaaaaatcgccaaagaggtgattgatgagcgggtgaactgggcggcgcaaattctcggcctgcgtgagtacctgaaacgtaagccggaggcgctttccggcgggcaacgtcagcgagtggcgcttgggcgggcgattgtacgcgaagcgggcgtgtttttaatggatgaaccgctctctaaccttgatgccaagctgcgcgtgcaaatgcgcgcagagatcagcaagctgcatcagaaactgaacaccaccatgatctacgtgacccacgatcagaccgaagcgatgaccatggcgacgcggattgtgattatgaaagacgggattgttcagcaagtaggtgcgccgaaaaccgtttataaccaacccgcgaatatgtttgtttccggatttattggatcaccagcgatgaattttattcgcggcacgatcgatggcgataaattcgttacggaaacgcttaaattaaccattcccgaagagaaattagcggttctgaaaacacaggaaagtttgcataagcccatcgtgatgggaatacgaccggaagatattcatccggacgcgcaagaggaaaataacatttccgccaaaattagcgtggcagaattaaccggtgcggaatttatgctctacaccacggttggggggcacgagttagtggtccgtgctggtgcgttaaatgattatcatgcaggagaaaatatcactattcattttgatatgacgaaatgtcatttctttgatgcagaaacggaaatagcaattcgctaaatacagggggaaggcattcccccaggataatacaaggaacaataatgaaaaagttattaccctgtaccgcactggtgatgtgtgcgggaatggcctgcgcacaggccgaggaaaggaacgactggcactttaatatcggcgcgatgtacgaaatagaaaacgtcgagggttatggcgaagatatggatgggctggcggagccttcagtctattttaatgccgccaacgggccgtggagaattgctctggcctattatcaggaagggccggtagattatagcgcgggtaaacgtggaacgtggtttgatcgcccggagctggaggtgcattatcagttcctcgaaaacgatgatttcagtttcggcctgaccggcggtttccgtaattatggttatcactacgttgatgaaccgggtaaagacacggcgaatatgcagcgctggaaaatcgcgccagactgggatgtgaaactgactgacgatttacgtttcaacggttggttgtcgatgtataaatttgccaacgatctgaacactaccggttacgctgatacccgtgtcgaaacggaaacaggtctgcaatataccttcaacgaaacggttgccttgcgagtgaactattatctcgagcgcggcttcaatatggacgacagccgcaataacggtgagttttccacgcaagaaattcgcgcctatttgccgctgacgctcggcaaccactcggtgacgccgtatacgcgcattgggctggatcgctggagtaactgggactggcaggatgatattgaacgtgaaggccatgattttaaccgtgtaggtttattttacggttatgatttccagaacggactttccgtttcgctggaatacgcgtttgagtggcaggatcacgacgaaggcgacagtgataaattccattatgcaggtgtcggcgtaaattactcgttctgataatgggctaaattgccggatgcggcgcgagtactttatccgatctataaatgtaggccggataagatgcgctagcatcgcatctggcattcaggcaaggtagctggtatttatttcagcgtcatatgcgtggcaacggtaatattctgtggtgacggttttccagaaattaagcggaataataactcgcagctttgttgacctaactcctgcgtcggaacatcgatgccgcccggtgcaggcgttaaaataaatgacagcgtttcattgctataacccaccaccgctaactgctgcggaatagcaatatttttctctgctgccgcacgataaatgctcattaatttcaggctgtcagtggcaaacaccgcctcaggcaacggtgactggcttaataattgccgtgctgcttttaatgcagtttcatgggtataaccgccatcaacaatccattcatcacgcactgcaatattatgcgcagccaggctctgcttataaccattaacgcgatcaaccgaaacatggacatcaagcggagcatgcaggcaggcaatattttgatgcccactttcaattaatgcatcggtcaacgcaatgctgtcgccaaaattatcggtatcgacagaataaacatgggcatattgaccttcaactttgccaatcaccaccaccggaatatcatatttatcgagttgggcaaaaaatgactcatccgctggcgaactgagcataataatgcctttaatcattttctgcttaattttgctttcgcatttttgcagatcttctgccggattgtgcgacgtttgtaatatcacgtcgaaaccttcttcttcagctttggcggtgatggcatgcaaaacttcagagaaaaacggattacccgccgtagttttggtcgaacgggtagaaatcaccataatggcatcaaaacccgaagaggtcagcgcgcgggccagcttgtttggctgatactgtaattcttcaatggcccgtaacactttttcgcgcgcttccggggagatattagtttgcttattcagcacgcgtgatacggtggattttgatacgcctgcaaccctggcaatatcataaatagtaggggacataggtcaggaactccgtccgaacgtgaatgctgcacatcttatggagttcgccggtcgatgacaacacgggcagttgataatcaatggcctggcccccacattcatatccttacgaatgattttttttctggtcttcagagcagcacaggacagcaatgaagcgacttaaaaatgaactcaatgcgctggtgaatcggggtgtcgacagacatctgcgcctcgctgtaaccggacttagccgcagcggcaaaacagcgtttatcaccgcgatggttaatcagttgcttaatattcacgccggagcacgtttgccgctgttaagtgcggtgcgtgaagagcgcctgctgggcgtgaaacgcattccccagcgtgactttggcattccgcgcttcacctatgacgaagggctggcgcagttatatggcgatccacccgcctggccaacgccaacgcgcggcgtcagtgaaatccgcctggcgctacgttttaaatcgaatgattcgctgctacgccactttaaggatacctccacgctgtatctggaaattgtggattatcccggcgaatggttgctcgacctgccgatgctggcgcaggactatttaagctggtcgcgccagatgacgggcttactcaatggtcagcgcggagaatggtcggcgaaatggcgaatgatgagcgaagggctggacccgctagcgcctgccgacgaaaaccggctggcggacattgccgccgcgtggaccgattatctccaccactgtaaagagcaggggctgcactttattcagcctgggcgctttgtcttgccgggagatatggcaggtgcgcccgcgctgcaattcttcccgtggccggatgtcgatacctggggcgagtccaaactggcgcaggccgataagcataccaatgccggaatgctgcgcgagcgctttaattattactgcgagaaggtggtgaaggggttctataagaatcattttctgcgctttgaccgccagattgtgctggtggattgcctgcaacctctcaacagtgggccacaggcatttaatgatatgcgtctggcactgacgcagctgatgcaaagttttcactacgggcagcgtaccctgttccggcgtttgttttcgccggttatcgataagctattgtttgctgccactaaagcggaccatgtgaccatcgatcagcacgctaatatggtttcattactgcaacaactgattcaggatgcctggcaaaatgcggcgttcgaagggatcagcatggactgcctggggctggcgtcagttcaggcgaccaccagcggcattattgatgttaacggtgagaaaatcccggcgctgcgtggtaatcgacttagcgatggcgcaccgctcactgtttatcctggcgaagttcccgcacgtttgcctggtcaggcgttctgggataagcaaggcttccagtttgaggcatttcgtccgcaggtgatggatgtcgacaaaccactaccgcatattcgtcttgatgctgcgctggaatttttaataggagataaattgcgatgaccgaaccgttaaaaccacgtattgatttcgacggtcctctggaggtcgatcagaatcctaaattcagggcgcagcagacctttgacgaaaatcaggcgcaaaattttgccccggccacgctcgacgaagcgcaggaagaagaggggcaagtcgaagcggtaatggacgcagcgttacgtccgaaacgcagcctgtggcgcaaaatggtgatgggagggctggctctgtttggcgcaagcgttgtcgggcagggtgtacagtggacaatgaatgcctggcaaacccaggactgggtggcgctgggtggatgtgccgctggggcattgattatcggcgctggcgtaggttctgtggtaacagagtggcggcgcttatggcgcttgcgacagcgcgcccatgaacgcgacgaagcgcgtgatttattgcatagccacggcacgggcaaaggccgcgcattttgcgaaaaactggcgcagcaggcgggtattgatcagtcgcatccggcgctgcaacgctggtatgcctcaatccatgaaacgcaaaacgaccgtgaagtggtcagcctgtatgcgcatttggtccagccagttttagatgcccaggcgcggcgcgaaatcagccgttcggcggcggaatcaacgttgatgattgcggtcagcccgctggcgttggtcgatatggcgtttatcgcctggcgcaatctgcgtttaattaatcgcatcgccacgctgtatggcattgaactggggtattacagccgtttgcgtctgtttaagctggtattgctgaatatcgcttttgccggagccagcgaactggtgcgcgaagtggggatggactggatgtcgcaagatctcgctgctcgtttgtctacccgcgcagctcaggggattggtgcaggacttctgacggcacgactcgggattaaagctatggagctttgccgcccgctgccgtggattgacgatgacaaacctcgcctcggggatttccgtcgtcagcttatcggtcaggtgaaagaaacgctgcaaaaaggcaaaacgcccagcgaaaaataatgcaatatcgggtgctgaccggatatctttacgccgaagtgcccgtttttccgtctttgtgtcaatgattgttgacagaaaccttcctgctatccaaatagtgtcatatcatcatattaattgttcttttttcaggtgaaggttcccatgcgtctggaagtcttttgtgaagaccgactcggtctgacccgcgaattactcgatctactcgtgctaagaggcattgatttacgcggtattgagattgatcccattgggcgaatctacctcaattttgctgaactggagtttgagagtttcagcagtctgatggccgaaatacgccgtattgcgggtgttaccgatgtgcgtactgtcccgtggatgccttccgaacgtgagcatctggcgttgagcgcgttactggaggcgttgcctgaacctgtgctctctgtcgatatgaaaagcaaagtggatatggcgaacccggcgagctgtcagctttttgggcaaaaattggatcgcctgcgcaaccataccgccgcacaattgattaacggctttaattttttacgttggctggaaagcgaaccgcaagattcgcataacgagcatgtcgttattaatgggcagaatttcctgatggagattacgcctgtttatcttcaggatgaaaatgatcaacacgtcctgaccggtgcggtggtgatgttgcgatcaacgattcgtatgggccgccagttgcaaaatgtcgccgcccaggacgtcagcgccttcagtcaaattgtcgccgtcagcccgaaaatgaagcatgttgtcgaacaggcgcagaaactggcgatgctaagcgcgccgctgctgattacgggtgacacaggtacaggtaaagatctctttgcctacgcctgccatcaggcaagccccagagcgggcaaaccttacctggcgctgaactgtgcgtctataccggaagatgcggtcgagagtgaactgtttggtcatgctccggaagggaagaaaggattctttgagcaggcgaacggtggttcggtgctgttggatgaaataggggaaatgtcaccacggatgcaggcgaaattactgcgtttccttaatgatggcactttccgtcgggttggcgaagaccatgaggtgcatgtcgatgtgcgggtgatttgcgctacgcagaagaatctggtcgaactggtgcaaaaaggcatgttccgtgaagatctctattatcgtctgaacgtgttgacgctcaatctgccgccgctacgtgactgtccgcaggacatcatgccgttaactgagctgttcgtcgcccgctttgccgacgagcagggcgtgccgcgtccgaaactggccgctgacctgaatactgtacttacgcgttatgcgtggccgggaaatgtgcggcagttaaagaacgctatctatcgcgcactgacacaactggacggttatgagctgcgtccacaggatattttgttgccggattatgacgccgcaacggtagccgtgggcgaagatgcgatggaaggttcgctggacgaaatcaccagccgttttgaacgctcggtattaacccagctttatcgcaattatcccagcacgcgcaaactggcaaaacgtctcggcgtttcacataccgcgattgccaataagttgcgggaatatggtctgagtcagaagaagaacgaagagtaagcgcgaatatgcctgatggtgcaacaccatcaggcatattaaattatgctttcagtacagccagagctgcttcgtaatccggctcggtggtgatttcatccaccagctggctgaaaatcacattgtcattttcgtcaataaccacaacggcacgcgctgccagacctttcagtgggccatcagcaattgccacaccgtaagcttgcagaaattcagcgttacggaaagtggagagggtgataacgttgttcagaccttctgcgccgcagaaacgagactgggcgaacggcagatcggcagagatacacagcacaacggtgttgtcgatctcagttgccagttggttaaacttacgtactgatgcggcgcaaacaccggtatcaatactcgggaaaatgttcagcactttgcgtttacccgcaaactgaccgagggtgacgtcagacagatcttttgccacgagagtaaaagtctgcgctttgctacccgcctgcgggatggaattggcgactgtaaccgggttgccctggaaatgaacggtttgtgacatgattatctttcctgtttacatatagttaacgtcacacctagtttatgctaactgtcaataacacagcaaacgctatttgcgcttaatccgcagaccaccgcgacaacaaggagtaaagatgagaaccgttaaggtattcgaggaagcctggcccttacataccccgtttgtgattgcccggggaagtcgcagtgaagcgcgcgtggtggtggttgaactggaagaagagggtattaaaggcaccggcgaatgcacgccgtatccgcgttatggggaaagtgatgcctcggtaatggcgcaaattatgagcgtcgtgccgcaactagagaaagggctgacacgggaggagttgcaaaaaattctccctgccggcgcagcacgtaatgcgctggattgtgcattgtgggatctggccgcgcgaagacagcagcaatcgctggctgatttgatcggcataacgcttcccgagacagttatcactgcacagacggttgtcatcggtacgcctgatcagatggccaatagtgcatcaacactctggcaggcaggcgcgaaattactgaaagtgaagctggataaccatcttatcagtgagcggatggtggcaattcgcacagctgtgcccgatgcgacgctgatcgttgatgcaaatgaatcctggcgtgcagaagggttggcggcgcgttgccagctattggcggatttaggcgttgcgatgcttgaacaaccgcttcctgcgcaggacgatgcggcgctggagaattttattcatccgttgccgatttgtgctgatgaaagttgtcatactcgtagcaatttgaaggcgctgaaagggcgctatgagatggttaatattaagctcgataaaaccgggggtctgacggaagcgctggcgctggcgactgaagcgcgtgcacaaggtttcagtctgatgctgggctgcatgttgtgtacctctcgtgccattagcgccgctttaccgctggtgccgcaggtcagtttcgccgatcttgacggaccgacctggctggcggtagatgtggaaccggcgcttcagttcacgacgggcgaattgcatctttaggatgccagcgcagcaagtttgccatcgcaaagagatatttttcgctggcttcgtcggaggagatgggcggaaactctgcggtgatgcaatgcaagttcagatctgcacaccaactgccgaaagagccaggcgtttcataaccgacgctggttaccagaggcaattcaaacgcctgagccagccattcgcctaattcgctgtgtctgggatcttcaatacaggccagtggatcgtggaatgagaccacccaggcaggttgaatgcggtgtataagctggcacagcgcctgggtttcaggttcggagccaggtttgtcacctgtcagtaatacgacatcgcgttcttcagcggcgctgttccagcgataaacggtttcaccttccttccagttcgccgccggaaagtttctgtttaaatccacaccattagcattggcccgtaaccccaactggcagccgtcaggattcacacacagcaccacatgatgacggcgcaaagaaggtgtcaacgtccgcagagcacaggagagcgtgacgaccgaagagttttcatcaccgtgagtgccagccagaatcaaaccactttcgcggctggctgcaggggcaggaaaccagattaacggcgcgcccaataatgaacgtccgtaatgttctgttccgggcggaaatgcgccgcgttcggcgcgtgggcgggttacggtcatgatcgtctctggttcaggaagtattacaggcagtgttgtgcaaattttgcggattatcaaatccttttcttcaacgctatgtcatcgatcttgtatcacttttttgccggaagttgtttgcattttattagttggatagggtttgtggatttttgctggctgacgggcaaataaagtttgtttaatggtttgcttatctgccagttgattaatcacatggcgggctatctgaccgccagcaccaagaatcagtacatttttcatgaaaattatcccagattattggcagcaatatgccagtccatatcactattgcggatttgaatatgtttcattacagagtttcctcaaagaacggagctaatactgaaattgcttcagccacataggctttgccgtcataaagatccatatggtttgcgccttcaacaatgtgatagcgtttatcctggcttgatgctcgatcgtacaggtcgtcactcatccatttgctccctgcctggctgcccgccacaatctgcgtcggctgagtcaggtacacttccgccatatggtaagcatcataggtaataatctggttaaggctgcgcaaagtagcgtaacccggtgctgttggatactgcgcgcgaggggtgtggtaatactcccaggcctgacgcagttcttcgttcggcgcatcggactccttcattggtgccagtggcataatggcgtattctccgctgctaatatcgctggttctggcgtttgaacccgcttcaacgtatggcagggcatcaatagatttcacattgttttcccaaccattacggaatatcgaaccaatattgaccgcactaacggtaccgatggccttgatgcggcgatcctgaattgcagcattggctgtatatcctgcaccggcacaaattcccatcgcaccaattcgggtattgtcgacataagaaagcgttgtcaggtaatcaatcacggcactgatgtcttcagtacgaatgtatgggttttctaactgacgcggctcgccgccactttcaccttgataagatgcgtcataagcaatagtgacaaatcccttttccgccagttttttggcataggttccggccgtttgttctttaacgcccccacctgggtgagataacacaattgcctgatactgacgggtttcatcaaattttggagggaaatagatcactgcagacaaagagatggttggattattgctgttagtgaagctgactttattattcatcattccgttcctcatggagttgtcggttcgttttaacggttggtgatatcactatagatattgatcattaagttgattagacccaaaatcatgattagacctatcatttaaatgattaatagattgcatggagatactgaatgaagcgtgaagaaatcgctgatctgatggcgtttgtcgtcgttgcagaggagcgtagcttcactcgtgcagcagcccgcctgagcatggcgcagtcagctttaagccagatagtgcgtcgtatagaagaacgattgggattgcggcttctgacgcgaaccacgcgcagcgttgttccaactgaagcgggcgagcatcttttgtctgttcttggccctatgttgcatgacatagattcagccatggcatccctgagcgatctgcagaaccgcccatccgggacaatacgtattactactgtagaacatgcagcaaaaacgatattgttaccagcaatgcgcacattcctgaaatcgcatcctgaaattgatattcagctcaccattgattatggtttgaccgatgtcgtttctgaacgttttgatgcaggcgtccgtctgggtggggagatggataaagatatgatcgccattcgaatcgggccagatataccaatggctattgttggctcaccggattatttttctcgccgaagtgttccaacgtcagtgtcacaattaatagatcatcaggcaattaatttgtatcttcccacatcgggtacagcaaatcgctggagattaatacgcggtggacgtgaagttcgtgttcgcatggaaggtcagcttttactgaatacgatagacctgatcattgatgctgcaattgatgggcatggattggcgtatctaccttatgatcaggttgagcgggctattaaagaaaaaaaactgatacgtgttttggataaattcacaccagatttacccggttatcacctgtactatccacaccgtcgacatgctggctcggcattctcattatttatagataggctgaagtataaaggtgctgtttagcactacttgctgatacattaatttaattcttctcttaacgtattctcagttcctttcaacgttttggtcattttttattcttcgtacaatggcgacagatgctgattatgataccgaaaacgggtttgaacgtgcgaagcccgaacgtagtgttcggagttctatgtgctttaccgcattttggagactattatttacactaaatctgggtaatgactccaacttactgatagtgttttatgttcagataatgcccgatgaccttgtcatgcagctccaccgattttgagaacgacagtgacttccgtcccagccttgccagatgttgtctcagattcaggttatgccgctcaatgcgctgagtataacgcttgctgataacgtgcagctttcccttcaggcgtgattcatacagcggccagccatccgtcatccataccacgacctcaaaggccgacagcaggctcagaagacgctccagtgtggccagagtgcgttcaccgaagacgtgcgccacaaccgtcctccgcatcctgtcatacgcgtaaaacagccagcgctggcgcgatttagccccgacatagccccactgttcgtccatttcagcgcagacaatcacatcactgcccggttgtatgcgcgaggttaccgactgcggcctgagttttttaagtggcggaaaatcgtgttgaggccaacgccaataatgcgtgcactggcgcgacatccgacgccattcatggccatatcaatgattttctggtgcgtaccgggctgagaggcggcgtaagtgaactgtagttgccatgttttacggcagtgagagcagagatagcgctgatgtccggcggtgcttttgccgttacgcaccaccccgtcagtagctgaacaggagggacagctgatagaaacagaagccactggagcacctcaaaaacaccatcatacactaaatcagtaagttggcagcatcacctaaatctgatttgatatattgatacttaaaacatttgatgcttcctttgtcacttttttgatggaagttgtttgcatttctttaaggcgaaacaaataattacgcatcaattttaatgtcggttagagggaaacttatgaagcactctgtttcagtcacgtgttgtgcgctgttggtcagcagcatttctctttcgtatgctgcagaagttccgagcggcacagtactggcagagaagcaggagctggtgcgccacattaaagatgagcctgcgtcgctggatcccgctaaagccgtgggcctgccagagattcaggtcattcgcgatctgtttgaaggtctggtgaatcagaacgaaaaaggggagattgtccccggcgttgcgactcagtggaaaagtaatgacaaccgtatctggacttttaccctgcgcgataacgcaaaatgggcggatggcacaccggtaacggcgcaagattttgtctacagctggcaacgtctggtggacccaaaaacattgtcgccatttgcatggtttgccgcgctggcgggaatcaacaacgcacaggcgattattgatggtaaagctacgcctgaccagcttggcgtcaccgcagttgatgcccatactttgaaaattcagcttgataaaccgttgccgtggtttgtgaatttaaccgctaactttgccttcttcccggtgcaaaaagccaacgtagaaagcggtaaagagtggacgaaacccggaaatctgatcggcaatggcgcttatgttcttaaagagcgcgtagtcaatgaaaaactggtcgtggtaccgaatacccattattgggataacgccaaaacggtactgcaaaaagtgaccttcctgccaattaatcaggaatccgcagccactaagcgttacctcgcgggggatattgatatcaccgaatccttcccgaaaaatatgtatcagaagctgttgaaggatattccggggcaggtttatacgccgccgcagctcgggacctattattatgcgtttaacacgcaaaaagggccgacggcagatcagcgcgttcgtctggcattaagtatgacgatagatcgccgcctgatgaccgaaaaagtattagggacgggcgaaaagccagcgtggcattttacaccagatgttaccgcgggatttacgccggaaccttcgccgtttgaacaaatgagtcaggaagaactgaatgcgcaggcaaaaactttgttgagcgcagctggttatggtccgcaaaaaccgctgaagctgacgcttttgtataacacttcagaaaaccatcaaaaaattgcgattgctgtagcatcgatgtggaaaaagaaccttggcgtagatgttaaattgcaaaatcaggaatggaaaacctatatcgatagccgtaacaccggcaattttgatgttatccgcgcctcgtgggtgggggattataatgaaccctccactttcctgacattattaacgtcaacgcattcaggaaatatttcacgctttaacaatccggcatatgacaaagttctggcccaggcatcgacggaaaataccgttaaagcgcgtaatgccgattacaacgcggcagaaaaaatcctcatggagcaagcaccgattgcaccaatttatcaatataccaatggacgattaatcaagccgtggctgaaaggttatcccattaataatcctgaagatgtggcgtacagtcggactatgtatattgtgaagcattgatgtgatgggaactggcgttacccttgtgcataacgccagtgatgtctgatttagcgaccctgttccggcggtgtaatgttatccatatacagcgtctggctggggaaggcaaagtccgcgccgtgtgactgtacaatatcgataatcttcaaataaacgtcttgctgtgcagcaagccattcagcccataccgtggttttggtaaagcaataaaccataatattcaatgaagagtcagcaaactggttgaaataaaccagtaaggtttgtcgctggtcgatggccgggtgatttttcagcatctcacgtacagcttcgacaataacgcccacttttgccgcatcctcataacgtaaaccaatggtcgtggtaatgcggcggttggtcattcgtcctgggttttctacgctgatcgacgaaaacagcgagttcggtacgtacaatggacgattatcaaaggtcgtaattttggtaattcgccagccaatttccgctactgtaccttcgatatttctgtccggtgaacggatccagtcgccaatactgaaaggacggtcgaaatagagcataatcccggaaaagaagttactcagaatatctttaccggccataccgacagccagaccaccaataccaccaaaggtcagcaagccagaaaggctcatgccgaaatgttcgccataaagcagaacaagcaccacaataatggtgattttgatgatacgcgacataatccgcgcactggtgatatcgcgaccttttttaatctgctgtttttcaaactgattaatcagcagaaatagcttaatcgtcagaataaccgcaatcagggacgtacagataaaatcgataacgcctggggtgataaatttgagtttatagttttctataacataattaataatgctaccaacagcactgataattatggtgtagattaaaaattgcaccgcatggaataaaaatccttttcttttacgatttccacggcgaaaccaaaagctcatcagaatcaatgctgcgcagctaccgaaaataatgaccagattaagcgcattatttgtaaacagttcagcgatcattgttttatcaggctcctccagataattgtcgtcatgccggaaacccctggcggggctattttaccgcgacaattcattcagatcatcaatagtcagggaaggaagtagcaacattagctaactaatcaatgcgttgattgtaaatccagctaagaggtgaggttttcagagcagacaacggtgaaatgtcatggtattgttacgtttaggtaacaagaaatttgtctgcacaaggattacatcatgattatggcgaaactgaagtcagcgaaagggaagaaatttctctttggtttgttggcggttttcattattgcggcgtcggttgtgactcgcgcgaccatcggcggcgttatagaacagtacaatattccgctgtctgagtggacgacatcaatgtatgtgattcagtcatcgatgatttttgtttatagcctggtctttactgtgttgctggcaatcccgttgggaatttatttccttggcggcgaagagcagtaagtaaaaaataggcccgataactcgggccttgtcagttattgaagagtcgttaatcgtcttcttcgtcatccagttcaacgggtgtctgatactggtcaggtttaatgaccagcaggtcgcagcgaagatgatcaatcacctgttccgccgtgttgccgaggaatgctgctgaaataccggtgcgtcctaccgtgcccagaaccacaatccccgcctgtaagtgctccgccaaatcaggaatcacctcttctggcagacctttttctacgtgcgtcatgttttcattaatgccgaatttctgccgcagggctttcattgccagcaaatgttgcccacgaatggcatcgttataaacgctcgggtcaaattccggcagttcaatcgcgatattaattggcgttaccggataagcgccaaccagatgaacttcggtatggttgacttgttctgccagttcgatcgtctctttgaccagtttttcattgagcgcattatgatacggctcttcactggcgagattcaccgccaccagcgccttgcctccttccggccacggctggtctttcaccatccacaccgggcttgggcatttgcgtaacagatgccagtccgttggcgtaaaaatcaccgcttccagacggtcatgttggtgcgccatttttagcaccaaatcgtgtccgccgctgatcacttcctgaatgatggcttcgaaaggacggttatgccagaccactttaatttcaatgggaacgccagcattgagataatattttgcctgctcgtggatccaggctgtacgctggctgatgacgccctgacgcatagcggtacgttcgtccggggagagcagggtggtcatttcgtatgagaagtcatagatcggcaaaaaggctttaattttgccaccaatccgttgatgtaaataaacagctcgccgcaatgctggttggtcgtcctggttaggatcgataacaacgagcatgttctgatacatagccatacagggtctccttacaacaactgtcaacgcagtttgtaattaaaagattaacccatatctggtgaatgaaacagtgatgaaccttctgccagatcaataaatcagaaaaatttaatgatatgacagaaggatagtgagttatgcggaaaaatcaggcaacgttacgcgtatgaccagcaagctgggccagcgcatcgttattttcgatggtgatgtatttacctttgactgccagcatgccgcttttctggaagcgacccagcagacggctgatggtttctaccgtcaggcccagatagttaccgatatcgccacgagtcatcgtcaggcggaattcacgaggggagaagccgcgttgggcaaaacgacgggacaggttgtagatgaatgcagccagacgttcctcggcatttttcttcgacaacagcaggatcatgtcctgatcgcctttgatttcaccgctcatcagacgcatcatctgctgacgcagattcggcattttaccggacaaatcgtccagcgtttcgaacgggatttcacataccatcgaggtttccagcgcctgcgcgaagctcgggtgatggccgctgccgatggcgtcaaatcccaccaggtcgcctgctaaatggaaaccagtgatttgctcgtcgccttgctcagtgatggtataacttttaatcgtaccggagcggatggcataaagcgatttaagttcatcaccagccttaaacagcgtctggcctttctgaataggcttcttccgctcaatgatattatcaagctgatcaagctcatgttcgttgagtgtgaacgggatgcaaagctggctgatgctgcaatcctggcaatggatagcacaaccgccagactgaatgcgccgtataattcgcttttccgggatcataggtctgctcaagccgtaattgatatttgtcaattttaacatctttttagggagcaagtaagtctaagcaaaccttaacagcagagaattccgatattagatgtaaatatatgtctatctatttgaaaacccttaagttgttaagggtaactttacataaaagtgtgaacaagctggcacaaattgtttaatgtttacagcaaaagataaccttcatggcgcaataaccactcttttcgctgaactccgcctgcatatccggtcatggtgccgtttcggccaataacccgatggcaaggtacgacgatgctgatgggattcgatccgtttgccgcaccaacggcacgcgccgcgccaggacggcccaattgctcagccagttggccgtaatgcattacctgcccgcaggggatagtgcgtagtgttttccagacttcgcgctgaaatggcgtcccccccgtagcagtgggaagcgtatcaataatgctaagattaccggcaaaatattcacgaagcttgtcgcttaaaccgcctggattggtggcagaaatgcgctcatagccttctttgcgataatggatgtccagcagctgcaccatgcgttcgctgtactcttcccattcaaccgcccgcaggcgaaattgctcatcgcaaatcacccacagtggacccagtggcgtggcaattttttcttcaagtaatctcagcatccgttctctcttaagacaaacgtgggtaaatacccggacctatcggcagaccgacaagataccacgccagcaacatcagcagccataccaccaaaaagataagtggatagggcaagactaacgaatagtaagtacccagtttcgcgtctggtttgtagcgttgcaggaatccaagaaacagtggaacaaaaggagataccggcgctaaaggcaatacggatgagtcggcaatacgaaagaggatttgcgcaaatgccgggtgaaagccaagtagcataaacattggtacgaaaatgggggcaagaatcgaccagattgcggaaccgctggcaataaacatgcataagaaagaggaaagcaacgccagaccgacaaacgccgggatgccgctaagccctgaactttccagtatatcggtcagccccacggcgatgaatttccccatgttgctccagttaaacatggcgacaaattgggcgaggggaaaaaccatcacgataaatcccgccatctctttcatcggttcaatcattaaatgcggtaaatccgcctgacgtcgaattgtgcgggtagcgatgccataagccagcgagacaacaaagaaaaaaagaatgatcagtggcacgatacctttaataaagggtgatggcatcacggtgtgattaatcggatcgcgcaatatcccgttttgcgggatcaccatcagcgcaatcgcagcaataaaaagtagcgatacgacacctgctatgcgtaaaccaaaacgctgactttcggtcaatgtctgcagtttctcatcgctgtttccctgccattgacctaaccgtggctcgatgattttgtcggttatcaggccgccaacaatcgtcagtacgactacggagctggccataaaataccagttatcaattacactgacgtgcatttgcggattgaacgcagctgccgcttccgtgctgatccccgacagcaacacgtcggttgtgacaatcagtaaattagccgtaaagccgcaacctacgcctgcaatggcagccagtaaacctgcaactggatgcctgcccaccgccagaaaaatcagcgcacccatcggtggcatgatcactaacgccgcatcggaagaaatgtggctgaaaaaagcaataaacagcaccatataactggcgtagcgggcattaacatgcgatgccattttaaccattagtgctggcagtaagccgacgcgctccgccagaccggcacctaaaaccagcgccaggatcgcaccaagtggagcaaaaccgctaaagtttttaataacattgggtaaaaaccagtgtaatccttccacactgagcaggtttttcaccacgaccggcgtaccatcggtcgggtttttcgcactgacgccaaaggccgacaaaattgccgtcgtcaccatgagtacgataatcaaatagataaagagcagaaaaggatggggaaccttgttaccaattctttcgacccagccatagagcttcccggattgggaggacgacggtatggatgacatactcatgggcattcctcggttgttgtgtttgcgttgttgttgttattttaaaggtgacggtgtcacgtttttcgggatagggcagtgatacggttgcgtgtccgttacttgctgatgctcttgttggcattcttgcaatagccctgaatcaaggaagagattgactgtggttgctgccatagttttcgccgccagcagcattcctttatgagcaatagatgttcgcccctggctaaccagttgccacgtatgtagcggtgtaccgacggcaaaacaggggctgaaacactgggcaacaggcagtttccaactgacgtcgccgacatcagtcgatgccgcaagcacgttatcggtggcggcatatggagcgacttcattcgccagtaccgtttcacgatgacgtagtgcaaaaaccttgccgttttcgccaccggttgcggcgatattattcagactgttttgccgatcgttggaggtgagcgtagcctgaatttgtttcgcaaaagccagttcttcggagttccattccggggtaccaaaatgggatagggcctggtacatggcattttctaaggtgcgattcgggagataactggaacaggctttgtcgaagcggcattcaaccgtggtttcggtcatcaatgccgcaccttcggcgattttggcgacccgatcataaatatgctgcacgtcggtcatttcgggggcgcggataagataaagcacttctgcctgcgcctggaccacgttgggcgagatcccgccgctatttgtgatggcatagtgtacgcgcgctttttcaataatatgttcgttgaggaagttggtgccagtggtcatcaacgttacggcatcaagggcgctgcgtcccaaatgaggggaattcgcggcatgtgctgcgatccctttaaagcgccatgatgcctgaatgtttgccagcgtgcgggtattgaacataccggcaaaggcttccgggtgccaggtgagtgccgcatccacatcatcaaataccccctcgcgaaccatgaacgttttacccgagccgccttcttcgccaggacaaccataaaagcgcaccgtgccgccttgcccatattgttccagccatttcttgacggctattgcagcggtaaaggcggcggttcccagcaaattgtgtccgcaaccgtgaccattttcaccgggcgtcacggatgtaggttgcgcgcaacctgcttgctgacttaaacctgccagggcgtcatattctcccagcagggcgataaccggtttgccttgaccaaacgaagcaataaaggcatttgggatattgcctacgttgcgggtaacggtgaagcctgcagattccagcgccgaagccagatgctccgctgaccagaactcttcaaaacgtgtttctggatgatcccagatttgatcggcaatatcggtataacgttggcgatcggcttcaatcgcatcgtcgataaaacgatagatttcctgcatcagatacctcgcgtccagggaaaattgagcgcggtgcgcgccagcgtttcgacggcaatagcgagaacctgctcgtcaaaatcgaatttttcgttgtgatgacctgccgccagctgtgtgccaaacaccacgtaggaggcttgcccttgatgttgctgcacgcgggccatcattaatgtggcatcttcggaacccgcaggcgcttcaacacgttcaatggcctgattgacccccgcgacctgagccgcctgactttgcaaccatgcgacccattgcggcgaaggagaactggcggtagctgcacccatcagacgagtttcaacgccgacaccatacatggttgctgcgccctgaatcgcttgttgtgcacggtcaaaaacatattgattaatgacgtcgctggccccgcgtgtttccactttcagcaacgccgaggcaggaacaacgttacgaccgcttcctgcctgcataacgcccacgtttactctggaagctccttcgctgtgcggggcgattgcatgcagtgcaagagtggcttgtgctgccgccaacaaggcattgtgaccgtcttctggttttgcgcctgcgtgagcggcggtaccggtgaagtgcgcgtcaaatttggtggttgccataaaattatcactgccgcacaccacggtgcccgcaggtacgccagtgccaatgtgcacggcagtaaaataatcaacatcatctacgacacctgcatcgaccatcgcccgcgcgccacgcgtaccttcctctgcaggctgaaaaatcagtttgatgacgccatgtagtccggactcgaactgtttaagggtatgcgccagcccaagcccaatggcggtatgtccatcatgaccacaggcatgcatcattccggcgttacatgacgcaaaaccgtcgcggtaggggcgatggctgacatcctgctcttcactgagatccagcgcgtccatatcgacacggaaagccatcaccggaccggggcgaccggtatccagggtggcgacgataccagtgaaaccaccttcaaaagccgcaatccattgtgctagcgcaccctgttgacgagcgcgctcgaattcgcgttgtagagtgaattcatcaggtaatcccatccggctactttcattaactacttcgcgacccagcgccagtgaatagccgagctggtgcaattcttccgcaacaagggtggcagtgcggaattccacccagccagactctgcatagtgatgaaaatcacgtcgccagtgcgataattttggggcaagcgaattaacaaattgattcaaagactccataacctttcccgtcatcagtaaaaagtgtgacccggttcacgtagcgatagtttttacttatcactaactgatttttcacagttttaaccgttcataaattaccctgacacaatcatctgcattaaagtagatgccagtttctttggtctgataaataacggttatcggtggcgtcatggcttttcaggtaaaaattcatcaaattcgggcttttgttgaagtggctcgtcagggcagcattcgcggagcgagccgaatgttgaatatgtcgcaaccggcactgagtaaatctattcaggagctagaagaagggttagcggcgcaactcttttttcgccgtagtaaaggcgtgacgttaactgatgccggtgaaagtttttatcagcacgccagtctaattcttgaagagctgcgcgcagcccaagaggatattcgccaacgacaagggcaactggcagggcagattaatatcggcatgggggccagtatttcccgcagtctgatgccagctgtcatatctcgttttcatcagcagcatccgcaggtaaaagtacgcattatggaagggcaactggtgtcgatgattaatgaattgcgtcagggagaattggatttcaccatcaatacctattatcagggaccgtacgaccacgaatttacttttgagaaattactggaaaagcaattcgcgatcttttgccgcccgggacaccccgccattggtgcccgttcgatcaaacagttactggattacagctggacaatgccgacgccacacggcagctactacaaacagttgagtgaattgcttgacgatcaggcgcaaacgccacaggtcggtgtagtctgcgagacgttctcagcctgtatcagtctggtggcaaaaagcgattttctcagcatactgcctgaagaaatgggctgcgatcccttgcacggacaggggctggtgatgttgccggttagcgaaattttaccgaaagcggcctattatttgattcagcggcgtgatagtcgccagacaccactgaccgcgtcattaatcacgcaattccggcgagaatgcggctatctgcaaagttaaaactgcataaaaaaatagagtctgtcgacatccgccagactctacagtacacacagcagtgcatccgcgtcttaaatccggcattgtctcctctgcgccggtgactgtgttataacggttttaacctttagttgccaattttcttcagtgacagatttcacgaaaatataagttacattattaatatcgtgaatgaataatcatgcataagtattttgcttaaaatatcggcaatatttggaacttattactggaaatttgggtaatacgttgttggaccgacccggtctggttatcatatcgcgctcttaattgcgggaggatgtaacatgaaccttgacgacaaatcgctgtttcttgacgccatggaagatgtccagccgctgaaacatgctaccgatgtccactggcatccaacgcgtaaccaacgtgcgccgcagcgtatcgacacgctgcagcttgataatttcctcaccaccggatttctcgacatcatcccactaagtcagccgctggagtttcggcgggaagggttgcaacatggggtgctggataagctgcgcagtggtaaatatccgcaacaggcgagcctgaatcttttgcgccagccggtggaagagtgccgcaaaatggtgttcagttttattcaacaagccctggcggatggtttgcgtaacgtgctgattattcatggtaaagggcgggatgataaatcgcatgccaatattgtccgcagctatgtggcgcgctggctgaccgaatttgatgatgttcaggcatattgcaccgcgctaccgcatcatggcggcagcggggcgtgttacgtcgcactacgtaaaacggcgcaggcgaagcaagaaaactgggagcaccacgctaagcgcagtcgttgatctcgagacgcatccgcggcttatgccgccagcacgcggttgcgtccatcatttttcgcccgatacaaagcatcatcaacgcgtttaaacagttcatcgatgctttcatttccttcgtgatgcgccacaccaatgctgacggtaaagcgtggtaagcccgaaatactcacttttgccacgcttacgcggatagtttcagccagcgaaagcgcggtatccagtggggttcttggtagcaataagacaaactcttcgcctccccaacgaaacaccaaatcgcctttgcgagcgcaactttcgagggtgcgggcgagggcgcataacacctcatcacctttagaatgcccatagagatcgttaatgtgtttaaaacgatcggtgtcgatgagcaacaagctgtaatcctgagcgatggcgagatgctgcatttggcctggttccgtaatgtgataaaactgtcgccgattcagtaatccggtcatcgcgtcatggtgagcagcatgttccagctgctcctccagccgtttttgctcagtaatatcatgcacaatacataacatgagcttgtcgccataaatttcaatcggtccggcataggtctgcacatgacgagtcgaaccatccgccagtttatgaacaaaattcaaaggtttatgaccaccgggtaaatgcgagatttcatgcatgataggcatgacgcgacgcccgagcatatttatttcccaggtatgtttctggcacatcgtttcatggttataaccatagaaattgagcgcggcgaggttagcatcgacgatttgtccatctcgtgacgggtcaatcaacaacattggtgcagagttagtcagaaaaaagcgcgcataaaaaccttgttttttgcgctgataatttgccgagcgactggcttttaaacccagcgttgccggcgcttcgataccttcgaaaataatcaccggttctgtttctgtcagctttcgcaaaacaagccgacagctcaatgctgtttcctcttctttacgctgaacagtgaggatttcgataatatcgtgttggttttgcagatcggagaggtatttcggcagttctttttgtgaggagacggaatagggtccggttcgtagctgactaaacgtgaggtcttgcatcaacagtttcgccgcgctattggcataaattaactgttcctcaaagggcgaaacgatccagacaggactggtgagtaagtccagggtattgaagttgtgcgtaatcattgagatcccgttatttttatcaatttttgttgctatccgatcgcaaaaaagccacgtcatatgatcagataattctgataatgatagacgctatttaacacttcacacggtttgtatacggaaaagcattttgctttttgtattcaatttagacagaattttattaatcatttcagggtaatggggtgatgagatgttgcgtaacagggccagaaggctagactacaaaataatgcgttgatgatggaggcactgtggaagcgattaagggatcggacgttaatgtcccggatgcagtatttgcctggatgctggatggtagaggcggcgttaaaccgctggaaaatacagatgtgattgatgaagcgcatccctgttggctccaccttaattatgtacaccatgatagcgcccaatggctggcgacaacaccgctgcttcccaataacgtacgtgatgcgctggcgggcgagagcacgcgtccccgagtcagccgtctcggtgaaggcacgctgattacattgcgctgtataaacggcagcaccgatgaacgccccgatcaactggtcgccatgcgtgtatatatggacgggcggttaattgtttcgacccgacaacgcaaagtgctggcgctggacgatgtggtgagcgatctggaagagggcacgggtccgaccgattgcgggggatggctggtggatgtgtgcgatgcgttgaccgatcattccagtgaatttatcgagcagctgcacgataaaattatcgaccttgaagataatctccttgatcagcaaattccaccgcgtggattcctggctctgctgcgcaaacaattaattgtgatgcgtcgctatatggcaccgcaacgtgatgtttatgctcgtcttgccagtgaacgtttgccgtggatgagcgatgaccaacgccgtcggatgcaggatattgccgatcgccttgggcgcggccttgacgaaatcgacgcctgtatagcacggactggcgtgatggcggatgaaatcgctcaggtgatgcaggaaaatttagctcgtcgtacctatacaatgtcgttgatggcaatggtctttttacccagtacctttctgaccgggttatttggcgtcaaccttggtgggatccctggcggcgggtggcaattcggattttcaattttttgtattctgttagttgttcttattggtggtgttgctttatggttgcatcgtagtaaatggttgtaacaaaagcaatttttccggctgtctgtatacaaaaacgccgcaaagtttgagcgaagtcaataaactctctacccattcagggcaatatctctcttgcaggtgaatgcaacgtcaagcgatgggcgttgcgctccatattgtcttacttccttttttgaattactgcatagcacaattgattcgtacgacgccgactttgatgagtcggcttttttttgcctgttatttatcagcgtctaccctttaagagtccacccaatgaccagagggaaatatgacgacacttatttatttgcaaattcctgtccctgaaccgattcctggcgatcctgttccagtgcccgatccgatccctcgcccgcaacccatgcctgacccaccacccgatgaagaaccgattaaattgtcgcatcgtgagcgtagatctgcgaggatacgcgcctgctaactttgcgtcgatgaccacgagaatagattgtgaccgctttttctaccctgaatgttttgcctcccgcccaactcacgaaccttaatgagttgggttatttaaccatgacgccggtgcaggccgccgcgcttccggcgatccttgccggaaaagatgttcgcgtgcaggcgaaaaccggcagcggcaaaacggcggcttttggcctcggcttgttacagcaaattgatgcgtcgctatttcaaacccaggctttagtgctgtgtcctacgcgtgaactggcggatcaggtggcaggtgaattgcgtcggctggcgcgttttctgccaaataccaaaattttgacgttgtgcggtggtcaaccgttcggtatgcagcgtgattcgttgcaacatgcgccgcatattatcgtggcaacgccggggcgtttgctggatcacctgcaaaaaggcacggtatcactggatgcgttgaatacgctggtgatggatgaggccgaccgcatgctggatatgggatttagcgatgccattgatgatgtcatccgttttgcgcctgcatctcgacagacgcttctgttttcggcaacctggccggaagccatcgctgcaatcagcggacgagtgcaacgcgatcctttggcgattgaaattgactcaacagatgctttgccacccattgaacaacaattttatgagacatccagcaaaggcaaaattcctctgttgcaacggttattaagcttgcatcagccatcctcttgcgtggtgttttgcaataccaaaaaagattgccaggctgtctgcgacgcgctgaatgaagtagggcaaagtgcattgtcattacacggcgatttggagcaacgcgatcgcgatcagaccctggtacgttttgctaacggtagcgcccgtgtactggtcgcgactgatgttgctgcgcgtggtctggatattaaatcgcttgagctggtggtgaactttgagctggcgtgggaccctgaagttcatgtacatcgcatcggtcgtacagctcgtgcaggaaatagcggtctggcgatcagtttctgtgctccggaagaagcacagcgggccaatatcatttctgacatgttgcagataaaacttaactggcaaacgccgccagctaatagttccattgcgacgctggaagcagaaatggcaacgttgtgtatcgatggcgggaaaaaagccaaaatgcgcccgggtgatgtattaggtgcactgacaggagatatcgggcttgatggcgcagatattggcaaaatcgccgtgcatccggcgcatgtctatgtcgcggtccgtcaggctgttgctcataaagcatggaaacagttacagggcgggaagattaaaggaaaaacgtgccgggtgcggttattaaaataatgaaatgttgaattgccgggtgcaagagtaaacatcttattcgggattgccggatgcgacgctggccgcgtcttatccggcctccataagagtagcccgatacgcttgcgcatcgggcgctatcctggttatttcacttcaaccacattcagccgtaactcatccaactgattttcatcttcttctggctgccagcacgccggttgtagtgggatctcttcgcgatcaaacgccagatcacccccgttaaccacttcagaaccgtgggtgatgcctttgaaatcgaacaggttggtatcgcacagatgcgacggcaccacattctgcatcgcgctgaacatcgtctcgatacgccctggataacgtttatcccagtcacgcaacatgtcagcaatcacctgacgttgcaggttaggctgtgaaccgcacaggttgcacggaataatcgggaacgcttttgcatcggcaaatcgctgaatatctttctcgcggcagtaggccagcggacgaataacgatatgtttgccatcatcgctcatcagtttcggaggcatacctttcatcttaccgccgtagaacatatttaagaacaacgtttgcaggatatcgtcacgatggtgacccaacgcgatcttcgtcgcccccagttccgttgcggtacgataaaggataccgcgacgaaggcgagaacacagtgagcaagtggttttgccctctggaatcttctctttcacgataccgtaagtattctcttcaacaatcttgtactcaacgcccagcttttcaagatactcgggcagaacgtgttccgggaagcccggttgcttttgatcgaggttaacagccaccagcgaaaaattgattggcgcgctttgctgcaaattgcgcagaatctccagcatggtatagctgtctttacccccggagaggcaaaccatgatgcgatcgccttcttcaatcatattgaagtcagcaatggcttcgcccacgttacgacgcagacgtttttgtaatttgttcaggttgtattgttctttctttgtattcttttgattttcttgcattatttcgattctctggtactcaatggggcaaattgggggcaaactttgcaactacgatagccgcgcattcaacatggctacctgttcgtcgttcatgtcatcaatccacataccgtaaatttcatacaccatctgcgcagtttcatgccccatctggctggctataaatgccgggttcgctcctgccgtcaacagccagcaggcaaatgtatgccgcgtatggtacggattacggcggcgaataccagcacgttttactgctgcattccaccttgcccccaaactgcttaccgagtaataaggtttctgttttccgttacacaccctgggcatgaaaacaaaatgcagtttttgcttttcggttctgccgtactcccgatgataaaaggtgatttcgcttttgcgatgatgcccggtcagtttgtattgctccttcagtgcttcaagagcaggctgcagtaatattaccgtccggatcccggcatttgtttttgggggaccgaacatatccagtatcgtcaggtttcttctgacattcacagttcccttctcgaaatccacatcctcccacgccagagctgccagttccccgtgacgaagcccggagtaaacggcaaatttccacaagttctggctctgtcctttttcactttccattaatgcattgaattctgttttagataacggatctggctttattctgtttcgctgtaatttttttactccttcaaatggtttgtttgatataaatcccgactgataagcaaaacgtaacaaagaacagagcagggcgatatagttatcaactgtgcgcactgttcttccttttttgttagatcttggattatccaggtaaagcgtttctccatgcaacagttcattccggtaatttaagatatcgctataacgaatatgtgatatcggggtactttcagaaattattatcctgagtgtttttaattgtgatttcgttttcttcattgtgtttgttgttaactctgtctctttaatttttgcccagatatcacaaagctccccgaatgtttttatgaccctcgttgtcaccatttttgccccagtgctggactggggaaaacgtcttaaatactcgaattcgccggaattgatttcgtgaactatcaacgctcttaaattcccggcctttttaatattactgttagtaacctcccagcctttcaatgtttcccgacatcgttttcctcgaaacatgaaccagatgcgaatgtatttaccccgaatctcgacacctgttggtaatttagacatatcatgagtctttgataaactgatttatcttcggatagttgtaccagataatccctcgcttgctgtctggcttacctaaaggagatactcgtttgaagtgaaagccttccacccagcaattctgacggtatgcttcaatttgtctggcccccagaccagtacgaagcatcagaccgtattcaaccatccactcttcattaaaaatcacttgtgccatcgcatcacctctggcgggcgacaatattagactgaaattgacgcccgacgttgattattaataatcagctatgaagttttaatttgaatacaatgcaattcacgaggactgaagtttctcgcaattaaaatttatcagttttactttctgctctctggaaacgcctgcttcttttttccctgagagcattttttcgcattccgatttggttaactttgtttttgagtaccttgtccagctggtaggagaaccaccttccttttcaatagtggcggtgattttatacatgaacacctccattattatttccagtagttcgtttattccatctttcgagtgcttctttttcacttccaccatagccggttcgggattcgcatccgttacacttcgcgcggtaatatcctgaaatggctttcaccgttactgatggacaaccacaaaaagggcatggtttgactttttcataccgcattgtcttttctctcataaaataaatttttttgatggcggtgggactacaccgacaaagtaaatatcaggagccgatatattctggtttcatatctgtcagtgtcgttttatacgcctcatataattcacccagatgtggccgagcagcattcagcgtattttccagagcagtaaatttttgttctgcttccggatcacctgatgaaggcaggtcatttatcatcttctcaatacgggcaatagcattgagacggtgatgacgctgaaccacttttcctttaagttccgtatagagagcgccaagtgtatttttatgctcttccacttcctgccgaagtgctgttgtttctccggtgctttgtgcctgctcaatacgttcacggaaagcactgatccagttttccccggcatcctgctcaataattgttgtttcacgttccgcatggcaggcggatgtgtttttatgttcctgaaccggattaatgattttttcctgtggttcgtccagttcgtcccgggtgtacactccaagaatcacttcagggcaataaaggcgcgcccagcgtttgagtgccagataggcaagctgctgacgaggatcatcggcccataatgttgagttacgtgttctggcctgcgccagaagtaactccagtacgcgtggtttgctctctccgcgtagtgttgcctggacgcgaactccaatcccgttttcatcggccagcttccagccaggtacacgatattctttccctttgtcgttcttcctgatttcaaatttcccgataattttttcccacggcccgaaccagtcatattcaatacgcccggttagcggcccacgagtactgattacggcattaaccagttgcgcttcatatccgagcacaccattcacaacgaaagttttctgagctactgcgtaagggttcatttgccactgcatcgcctgcatggtgatggccatgcagtctgatggatttcctcggaggtgttccggtacagtagccatgccggaagccattacctgagaaaacgtctgaattgcagccagagactgagggctgaaaaccgcaacattagagttaatattttcttgttgagttaattcgttcattgtgtccttcctcagatgctcagtgcttcaagacgacgaagatcaaagtcgtttaattcgtcggtataactttcggtaatcggtgctggccagttgtttgtctccagcgcttcgtttatctgtcgtagcgtccggcgatattcctgtcgaccaagttccaggagttcctgcgaggcttccacgacagccacccagtgatagccagcatctttgttgacgaagatccagaaaaatttgtccaggtttgccacatcgcagtacattgcggcgctcaggtgataatcacgttcaataatttcacggtgtaagcgatcttttagtcgttcttgccgcacataaccgaggctgactgacttcacgtcggcgcagatgctttcgtatggcagtcggatttcgatatcagggcggaccctgatttccagcccggtttcttcatcaaacccgaaatagctgatttcagatttgcgttccgggtggttgagtagtcttgccgcgtcagtattgttttgcagtgccgcgtgaatattttttgcctgttcatacatatctggactgataaacgtttttcctgcattttcttcttgctggcgtttttgccagttctccagtgttaccagttccgggcgaattttccgggcgatttcggttaattgctcttttgtgccactgatgttgtaaggcaacgatttagcacgttctttttttgccagttctggatctacagtttcaatttgctccagaagctgctcccgtgttccactggttttcagcagaggagggaggcttgcgttgtattctttaatacaggctttcattgctgatgctgtgtgtttttccccctcaggaatacgccgaaattcctccggaagcgaaccgtaaaggatgcctgtttcttcggccccagcgcttaccgacagtggctgtataagagtgctgttgtagctttcgatccactctttcatctgctctggtgtcatcagtgatggcagactggcattgtattttttaatgatggtgatcagttcgttagaagtagtaaccacatattcaggaaccggtaccggaatggcatattcatcagcgaatttatccgtttccagaacatagctgtgaatgatccgcccacgcagcaatgcatcactttcctcgttcggaatagtcccggcaatgtgccgcccgtggtaatacatcagactgatgcgggcatccttcagcattgtgctgcttattccgttggcggagtgataaacctcgttcgggaggttttcatagcggccaggctcgaaatatgacggccacatgatttcagttgctacatgagctgacgcttcaccagtttcatcactgcaatcgtgatgcggatggttgccagcgttctccttgtgcggatgttcagtgccttccatttcctccggatcattttccttagcttcaacctgattctcttcatcgaatgtttcctggtatgttgcgtcgcccatcactgcaccacagtcagggcagttatccccgccagtctgaccgcaggcattgcagactatttccggttcctgttgcactactggctcaggttgtttcacatccgggctggttttttccgtttctggctggttctggtacacagaatcgcgggtctggatccccttaacccatttcggatcattcgggtcgctaatcccttcaacaaattctccgcgagaggcagccagtaatttgtctgcatcgacaggatttttgggcggaatgtttttccgggcttcatggagttctgcccgcagtttctgatatttcgcatcaacagaatttacctgtgactgagcatccagcgactgcgtgtcctgatgatgttcagttgcatccggttccactgtttcagccgttgcctgttcatctgccattgcgcaagatggttgcagtttttcttcatcatcctgtttttcttcttctgttacacgctgcggcatcggggcagaggaacgaccgcaggcaatatccacgatttctggatcagggttggcatgatcagtttcagtcagtactttgttaagatattcagtgacgtgtgcggggataacctcgatcccaattggtgcttcttttacggacgcaaccacgatggcgcgggaataatccagcccaccaggcatggtgatgaatttgtcgcggaaaacagaaaagggtggtttattttcagcgataatttcctcgacacgtttagcgtgtgccggatgaaggttataaatgtccacgtccattgaacgagccagtacgccagtggctacgtcgcgcgccagtgacgtcagatcgtgaacgaaaccttcgccgcgatcggtgaggtttccgccgccagcattagcgccggaagccgtgcgcgtgatgcgtgaaacacgatttccttttcgccattcttttgtcagaagaccgcgatcaatgtgttcggtatccagccaggctgaaatgaaattcttaaattcatagggctgatgttttttcgtgatagagaacactgccttaattgcatcagtcaggcggagcagggcggcattatccagagttgtcggttctgccatgctgcgtatggccaacagcagattctggacatagctgttttcctgatccatctcaagagcagtaatgtgtttgcgttgttcacgggtggcatgatgcaggtatttccgatccccggctgcatacgtaaaaatgtgcagaagacgctgtgtgaaccgcaaagtggctacagagacttcgcaatcctggcaatcctcgtgggcgtctgcctgcgcgttttcttcctggcctcccgccagttcgttggtttcttgagcattatcctggtggtgaacgtcgtctggcgctgctcccggttttagttcccatgtcatggagtctttgctgagttgatagcgttcactccaggtaaaatcgatctcaccttcagggggcaggtcattaacgacaggaaaattagttgcaatagctttaaaatagttgctcagttttttacctgacttaacgatcaggtagtccagagtggcacaggttgattcaaaatcgtcgcttgcccacaggacgacgtcaggctcaccggatgattttttcgctttccgtaaaaggaagagtggttttgtgctcattgttttttaacctcaactcagattaaaattactgcgagtgatgaataaatgtcccaggttcttcactcaggcctgcacacagtgcaggctttctttttttcagatttcaccgtttaatttcattgcgatcagagttgccagaaatccggcttttttttctgcgggcagattctttccgatgtgaaccaggctcatttttgtgacaccttcatcaagtgtttttacgttgcctgatggaccatcgatatcaaccacagtgaatggggtttctttattttctgttttaattacgtagccaatgcgctttccttccagattcacctcgtgaacaatgtcatcggtagttacaacagtggtttcataattggtaatcatgtttttctccttaattaaggttgagcgaatccctgccatttctggcataaattcagtttcgaatagtcaattaattaaagttcgtgtgccatctggtctttttcggcacaagcttcactgcaatattttctcggttcgtcttttgataaagtcccgtgcatgaagtgaagcattctttcaatagctttgctttcttcaacgtcttttttgcaaaggtggtaagcacattttattttcttagtcatcaccatgactccgcctttacaggtaaaccatcacgaccgaggaagactttaatcatgcggtcagtaatgcatgtttttgtggtcaggttacgaatataaagttttcgctttttaatattgtttgccgaggcaatatatgtccggccttcatgaagaacataatcgccaggagtcacacactgacgtggtatttcatcagttccaaagtgatgagcaatcataattatctccatttttacaaatgaactttgtcgatgcggtgcctggtgcctccaggtgactgtaaccagttaacaattacagtcggctttcccacccaaaccaataaggactaacatgacttttaactgtgccgcgtgcgcttagccgcattcaccgcatcacaaaattcactttaaaaagggcggacatcagccgaacttcaagaaaaaaactgatgccgccaggatacacacagcaatgtcgttatttacaaccggaggcgcactcccaccatttaaatttaacagacaagaccgactctttatggatatcggaaatgcgccttcgtgttgtgcccagttttatttcaccacctccgggctttggtggtttctgctatacccctacagcgagaatattgaattaatctaaataatggattagcaagtatttctggcaagccagcgacgtgcgcccgtttcagttttgaatgtcttgcttttggtataagtcatggcggtgaacgttccatcctggttggggaacacgccacataccagagattcgttgttgccaagatcgatagtatccatgttgacctcatttccccttaacgccgggtggcggaactaaaacctacagcgccgtgctgcttctgtaataatattagttatgttcatattgatgatcaatagaaatatgcattttgttgataaaaatgtactatcctaatgaaatttttagtgttttttttgataaaaagtaaggcggggcgggcggaggggacaaaaaaaaccgccaaaaatggcggtttagttacgaggtggtgggagctatttcttcatgcgtttttgagctgccagcatattttcaaatgcttctttgtagagttcattctgacctttaagtctttcgattagttttgctttttctgattcgggaaggatatcaaaaagatctagtaaatcagcttgttgcttgttaaccatccgccaaccttcgccttcgaaactttcgtcataagttcctgaggaacggacgtaattcatcagatcagctaaatcaggcctcaactcttcaggcttaactcttagtaatacagcgaattttaatgccgcatcagtattaagtggagcctttccgttgagataatggctaaccgcagattgcgcctcaaaacccattagctcggcagcaagctcctgagtcagtttgagctctcttttttttgcatcccagattgcgcgcagacgttgcgtagcttccggcgatgcgatttcttcgcgttttcttctcataccaccatcttatgaatacagttcataatctcaaactgatataggtattgatcatttaaattagtatggttaatattttggtgagccttactaaggtgacccttatgacattagatgaatatttgaaaaaaaatcgtgtacgacagtcttgtttggccgcgctggctggttgttcgcaatcaatgattagcctcgctgctactggacgtagtcagttaagccctgaaaaggtattgcgtatcgcagaggctacgaatttcgaggttacacctcatgaactccggcctgatatctacccgaatccgaccgatggtttacctgttggatgtaaggctaacacacaaaatacacaggagttgattcatgaaaatcaggcatgagcacatcgaatcagtgttgttagccctagccgctgaaaaagggcaggcgtgggtcgctaacgcaattactgaagaatatctgcgccaggggggcggcgaattgcccctggtaccaggcaaggactggaacaatcagcagaatatctatcaccgttggttgaaaggtgaaacgaaaacgcaaagagaaaaaattcagaagctgatcccagcaattctggcaatccttccgcgcgagctgcgtcaccgactctgcatcttcgataccctggaacgccgtgcattactggcggcgcaggaagcgttgagtacggcaattgatgcgcatgatgatgcagtccaggccgtttaccggaaagcgcatttcagcggcggtgggtcgcccggcgattctgtcgtagtgcattgattgaaattaatcgtgccggactgttttgttcggtatcagttaaatgtaacgctgcgagcgttacaaggtgaaaacaaatggcttcaaactggataaagctcgaagtgattacgccggataagccggaaatattcaggcttgctgagattctgaatattgatccagatgccgcattagggaaagtcattcgcttctgggtatgggcggatcaacaaatgatagacggtaacgcggagtgtaacgctcgcggcgttacaaaaagcgcaatagatcgcatcacttttatggttggttttgctgatgcgttaattcaggttggatggttggtcgaaactaatggtgtgttgtcgcttcctaactttgagcgccataacgggaaaagctctaaaaaacgggcggttacaaacgagcgagtaacaaaaatacgcgaactgaaacgaaaaggtaacgctggcagcgttacacaaacggatcaaaaagcgttaccagaggaagaggaagaggaagaggaagatataaatactgatctaacccatcccaaacccttcccttccggaagggagtttcgggattttgtggctggagtgcttgaggggagattgtctggcggtactgcagcagaattttgtaattctgcggtggcggcgttgcaggctgctggcctggatgtctgtcgtgagtatccggtaccagagcgtggagacggctgcggagggcggattgatatcgtcgtgactgacaggaacggtgtccggtgtgggatcgaacttgaccgaaattctccacgacaaaaatcattgctcaaaatcggtgctgttgaaaccgggatatgtgtcttgcggcgcagtgatatcgcaaggcacaccgagcagggaattctggttatcggtggggcggttcgccagaaaaaattcgacccgttgtcagttgctctgcccgattggttgccggaaacactctggcatgagtgggtccagttcaggcaggcattgcgaaaaccaattcgaacggagcagggcgctaacggggcgatacgggagctggaaaaattccgccagcagggtttttcacctgagcaggtgattcgacacagcatcgccaatgaataccagggcttgttcgcgccgaaaggtgttcgacctgagacgttactccgacaggttaacaccgtctcgttaccggatagtgcgatcccgccaggcttcagggggtaactgaccatgaaaaatattgcgacaggcggcgttcttgaacgtatccgcagactggccccgccacatgtaaccgccccattcagaacggtagcggagtggcgagagtggcaacttgctgaaggcctgaaacgtagcgaggagatcaaccgcctgaatcgccagttgcgggtggaaaaaattctgaatcgctcaggcatccagccgttgcaccgtaaatgctcgtttgcgaattaccaggtgcagaacgacggtcagcgatacgcgttgagccaggcgaaatctatcgctgatgaactgatgaccgggtgtacaaattttgcgttcagcggaaaacctggtaccggaaaaaaccatctggcggcggctatcgggaatcgcctgctgaaagatggccagaccgtgattgtggttaccgtggctgatgtcatgagtgctctacacgccagctatgacgacgggcaatcaggtgaaaaatttttgcgggaactgtgcgaagtggatctgctggttcttgatgaaattggcattcagcgcgagacaaaaaacgagcaggtggtgctgcaccagattgttgatcgccggacagcgtctatgcgcagcgtggggatgctgacaaacctgaactatgaggccatgaaaacattgctcggcgagaggattatggatcgcatgaccatgaacggcgggcgatgggtgaattttaactgggagagctggcgtccgaatgttggtcagccaggaattgcgaagtaatttttaccgggaggaaattttaatggagactgtttttgacgcactgaaagcaatgggaaaagccacatccatagaacttgctgcgcgacttgatatcagtcgtgaagaagtgctgaacgaactatgggaactgaaaaaggctggttttgttgataaaagcgcgtacacctggcgtgtggctgataacaacgttcagcaggaacagccagcgcaggcagaactgccggaagaaaccaccacagcaacagtagcgaaaatctcagagtgcgatttaaccgcaacgattgaacaacgcggaccacaaacggctgatgagctggctacattgtttggtaccacatcacgcaaagtggcttcaacgctggcaatggcaatcagcaaaggttgtctgattcgcgtaaatcagggcggtaaatttcgttactgcataccgggcgataatttaccagcagagccgaaagcagcatcggtagcggaaactgatggtaaggcctttcctcagcccgcaggtgttgcattaccagtacaggaggctgcaacacaggaagatattaaaacagaaacggtggcggacattgtgcagtcgctgccatcgtttactgaaacgcgagcggatgacctggttttaccatcactgcatatggcaaaccgcgaactgcgtcgggcgaaaaatcatgtccagaagtgggagcgtgtctgcgccgcgctgcgtgagttgaacaagcacagggatattgtacgacagattactgattcttcccgccatgttgcatcggaaaagtgattgccggaggcgcttatggcaaaagtatttacacaagaagagcgggaaaaaattaaggggaaggttgttgagctcgtgcaccagagtgggcgcgagacgttacgacaactggaagctaagacaggtgcgacaaggtatctgatgagtgttcttgccagagagctggttgccagtggcgatttatacaactccggctacgggttatttccgtctgaacaggcacgtaaggactggataaaggcccgcaaaaagatgtcgaaagcagcagtgaaaaaaaagagcgacccggacctggtttattcattaccagacggagaaatacgccgctatgacaggcgtctgaacataatctgtcgcgagtgtcggaggagcgaagctatgcagcgcgtactggcgttttaccagaatggttttcgagagatattcggtgaacaggttatgcatgagggaaatcatggcactcaggtcagtgtgtaggcacgttgacggtagaaagcatatgggggatcgatcgttcttgttatgctgtaagagcgaaagcgcaggcgctgggtatcaacaggatgttacggggtgactttcacttgagctagtgggatcaattttactgttggggtggggggacgttaagttgctgacaatttcgaaatgtttttgataaaggcagcgattttctttgatggaggggctacaaaaaatttttcatgtgaaatatgatatctgcgatgttatcaaatgtgaaaatatttatgaatctgcaaaaaagaagaaaagttcaaaaactaaactatcgcgggcaagtttcgaaactgaagagggggatatttaattctctgaaaagcacggattgggaaggagtagaaaatgcgaagagaaaactggaatattacaaacgcactcgtaagctacgagtctcgaagaaaaagttgacaacaagtaataaaagggtggttttttctgctccgatatctattaattattacaacgatcgtgattttgaaatcatgaataaatttttaaataatttacgcgattgcgtgttgaagaataatcgtgtttatatagatttttcttcaactaaatatataagtgcagctgctatgttatcttttctcgctgaagttgatgtgcttattaagaaaagtgaatttggagtaaatgccatagggttttcacatccgaaagacaagaaaattgaaagcattttgaatcaagtcggtttctatgatctattaaggaaacctaaaagagaaactgaaagttatgatgatgtgactttttggaaatatacatcaggttcttgttctgagcctcttttagcaaaagaaatgatggtggaaataaaaaaagagttagaaagaaaatcatcaaaaaaattataccgtggctttactgaggccatgtctaattctgtcgagcatgcttatgttgatgatttaatgcatacggaagatgacgaaacagctaagtggtggacctttgctggcatacatgacaaaaatcttacagtggtaatatgtgataaaggagtgggaataccttcaacattgcctaaaacacaaggtgtaagtgtgctaatgaacatcttcaaaaaacttagagttccattagcaaatgtaaaggattctacttatataaaggcttccacgttacttcaggaaacgaggactggggagctgaaccgaggtaaaggcttgaatgatatcaaatcggtaatcgattcaataggtgatggttttatggggattttttcatcaaaagggcgctatatttacaaagggaaaactggcattattaacgaagtgcttagagattacaaaagctctgttaatggtactataattgaatggacaattccttgtgaggtggaaactgagtagtatgaaaattataaaagtagccagtcgttatccttgcccaggacctcgttttaaaagattggggcccgcttctggtgaggagtttcgtgagtgggtagaaagagagcttaaacattcaccagatctaacaatagaccttgatggaacggaggggtatggttcttctttcttggaggagtgctttggcggattgattaggcgtggcgtgagtcctgataaggttaaagggattaaatttatctcagaagaagaacctgagttaattgacgagataaatgaatatatcgaggacgctataaaggtatctcatggctaattcaagtatccaggtctgtacttggagtgcagacttttggtgtaagtttttttctttgtttaaagatgaaaatcagtatgtaacttggtttttagttttagttggatgggggattacggcatatattgcttatctccaaaccacaaaaagtagaggagatgctattaaagatgctcataatgaatggatcggtgagtttagacaaaaactggagttgcttgaggattttgccttagagttctgggctgaagataataataaagaacctacactggcgttagcaaaaatgagtagggaggttaagagtttaactactatcgctaaagaaattgaaagggccggtggtgaaaaatataaggcaaaattgtttaaggaattacgccaagccatgacatatgatagtgatgttcacaaccgacctctaagacctgattgtatgcaaattgttaggattagagaaacatgtgcaagtttgagaagtgcgtacgggcgcaaaagcttgactgaataacctcatattgctgagtagctggtactgcatattattatgaaaacacatcgtggtttttatataaaagctgcttattattaagagatctgttttatgtttttggctagtaaaatgtgattcttaacttaaatgttcccttacactagatttataatatcatcgtgtgatttataaactatgcattagtaataattaatttttcggaaaaatagttaagtaaaattgctgcgtgtgcttgaggctatctgcctcgggcatgaacaccaacggcagatagagaaaagcccagttaacattacgcgtcccgcaagacgtttaatattaaacttaggccaatttcatgctagacacatggatgttagcctcttacgtgccgaaaggcaaggagaagcaggctatgaagcagcaaaaggcgatgttagtcgccctgatcgtcatctgtttaaccgtcatagtgacggcactggtaacgaggaaagacctctgcgaggtacgaatccgaaccggccagacggaggtcgctgtcttcacagcttacgaacctgaggagtaagagacccggcgggggagaaatccctcgccacctctgatgtgtcaggcatcctcaacgcacccgcactaaactcgcttcggcgggttttttgtttttttcagtgagttttttccgtctgcctgtactggtgtgggtggctaattttgttattcagatggcttattgctgttgatcggtatgtcttcacggctagaatcgaggctcttaagtagcgcgcagggataagagggatggaccctgagaaggggagagctatttatctggaaggattctgaagatgaaaatcgaagaattgcgtgaaatttttagtgaaaatggcctctatgctgtgcgcgttgagaatgggaaagttgtctacacaacgttaattcctgatgatcatgtgattttatctatcgaggcattcattgaatacctggaaaggctcggtttcaaggtggttcgggaatgagttataattcgtaagccagcctgaacaactggcaacctacagcgccattggagataacaatggcgcatatacaactggtcaaacaaacttcttctggtttacttctcccggcgacgccggagagttgcgattttctgcatcaaatcaaaataggcgagtggatacacgctgattttaagcgcgttcgtaactacgcattccataagcgttttttcaaacttttgcaactcggattcgattactggactccggtcggaggggcgatcacgcctcgcgaacgaaaactggtttcaggattcgttgattacctgtgtgaatcagtaggccgggaacatacgccagctctgagcgaagccgcagagcaatatctgaatacagttgcgacacgcagaacccgggatacggcattgctaaagtcgtttgaggctttccgcgagtgggtaaccattcaggccggattttacaccgagcatatttatccggacggtagccgcgggcgtcgggcgaaatccatcgcgtttgcgaatatggacgaaaccgagtttcagcaggtttataaatctgtgctgaatgtgctgtggaactggatcctgttccgtaaattttcctctccggaacaagtcgaaaatgtggccgcgcagctactggagtttgcgtaatggtgaatttacgtaaagcggcgcggggccagatgtgccaggtcagaatccctggctactgcaatcacgatccggaaacgtctgtgctggcgcattaccgactggcgggaacgtgcggaacagcgataaagccacacgatatgcaggcagcgattgcttgtagctcgtgccacgatttaatcgacgggcgggtaaaaaacagcgattacaccaaagaagaattacgcctgatgcatgcagaaggtgtttttcgcacacaagaaatctggagaaaggagggatatttatgatttacccaacgaatacaggaaaaagcggagaacaccttcgtctcaacacgctggaaagtgtctggattcagggaaaactacgtatgtgggggcgctggtcgtatattggcggcggtaggtcagggaatatgttcaatcagttgctggcgtcaaaaaagttgacgaaaacagccatcaatgaagccctgtttagaatgaaaaaagcgggaatagagaaacctgaactggaatcatttttgcgagaaattatcaatggcaaacaaaagagctggctggtgcattgtactgatgccgaggcgctatgcattgatcgggtgattagtgaagtgctggcagatcatccggggttgatttgtatcctccagcagcggtatgaaggacgggggatgactaagcgcaaaatggctgaattgctgaatgatgcacacccagagtggtgttttagcacatgtgaaaagcgaattgctaattggttggctgttgctgagtatgcgctatacattcccatgcgagaatcacttgctcaaaaaatagcttgattttttacgcacaaactgcttcaatttcgctacgcttcgcaaagctgtatcgcgaggtgagtctgcgcaggaactttaatagaacccgccttcgagcgggttttgttttattcatacgtccgtagtatacacttctgattatattttcacattctgactgttcctgttaaataaagattgtattaattttaatattttgttgaatacatggtgtttcttatttaattagcgcgggatgtgatggtggtatgtttctggttaattaaatgagtaaatagatgtcagctaaccatggaggacagcaactctctgattgacttttaattatttcttagatttattttgatggaggcgttgctattatttttaagtaagaggtgaaatattgtgttgaaaatatttatattgtttctcatttctttctcatggtatgcgaatgctacggattttgtttatagagtggattctcgccctccagaggaaatatttcgtgatggatttagatctcatggttttaacagaaatttacagcaacatttaagaggagactcatgtgcggcaggaagtagggatagtgcatttattgcgaccacaaccagtttaattgaaacatataacatagccaggcaatattattcaagttctggatttcatggtagattatatcgttaccgtatcagggcaaataatattttttatcctattcaaccgtcagtcaattatctaacccagcgcggtgtaaccttttctggatttgagcggataatgatgcgagagcagaacgaaattgtcgcagttgaacatatccctagtgagaatattgttgaggcagtggagttgacttatgacagattcaacagtcaagtatctgatggacccggaaccaccaatgccaggtatgttcctggatccacatttgtaaatccaggtgttatacctcaattagttgtaccaactgtgtcagttagagaaagaatcaatgcatttggaagtctgatcagtgcctgttttgctctgaagggagtcagaagagatggtttaaataaaagagccacttattatgaacccgaattttatgatgcaagaggtgtgttaaaagaaataataaaatgatgctattgaaatgatgtgtttattatttgatttgttgattaacttgttagcgtatataagaggttttatgaaacggaaaataaaatattccttaattgctctttcattgttatctggtacaagtcatgcagtgatgagtgattatgataagtactttagtaatgttcagataaataatttatcatatggagtttacacatccgggggtaaggaaagtcagtttttttgtattggtataaagcgtgataatgtgactcttcccattcacaatatgtgtaaggtggatgtctttggatctcataaacaaggtttcgatgccatgatggaaatggctaagtattattatgctactggtgaaagtataagggtctattataaggagaatgtgtggagtgattccgagtttaaaaaggccttctctactaacgaactaatttctttaagcacatgtagttcatctgattattgtatgggaccacaaaaagatacttaatcacataattttataacttggtataaactcccatcacgctgattttgagaggtatttatgtctgaacccttatccggttccggtacggcagcggcgctcggcggggcgacggtattcgggctgtttaccggaacggatttcgggattgtgtttggtgcgttcgccggggcgttatttgtggcaacgatgccgcaggcgctttcagcctggcgggtggcggcgcattttctggtgtcgttcattgtcggcgtgctgggagcgcgtgtgctgtctgcctggatagcggcaaaaacaggttatgacggcacatcggcagatgcgctgtgtgcggtgctggtatccgtggtgtcggtgaagattctgtcgttcatccaccagcaggatatcgcatcactggtgtccggcttgttctcccgcctgcggggtggaggaggcggcaatgttaagtaaccttcccggattgctgaatgtggcgttatgcacggttatcgtgctgacgctctttttttatcgtcgctgtgattccagacataaaccgctgatgtcatggctggcctggctgctgatgctgctttatgcctttgcgccactcagctatctgtgtggtcgtccgttagcggcgaactggctggcggtggggcttaatctgctgttctgcgtgctggtgattcgtgctcgtgggaacgtttcaaaaatcctttcattacggaggtgagtatgtcgggtaaattcagattcagccgtcggagcgagaaaaatctggagggcgtaaaaccacagctggttgctgtcgttcgccgtgcgctggagctgacggaggttgatttcggtattacggaaggtctgcgcacgaaagagcgccagaaacaactggttgcagaaggcaagagccagaccatgaacagccgccacctgacaggtgatgcggtggatgttgttgcttacattggcagccaggtgtcatggaactggcctctgtacgagaaaatcgcgcaggcatttaagcaggccgccacagagctgggaatcgccatcgaatggggcggggactggaaaacgttgaaggacgggcctcactttcagttgaaacgataaaaaaaacaaaacacaaggctgcaacgagtggccttctggcccacgtaaaggcgtgggctttttcatatctgaatatttctgcgcatctcacgcgcatctcacaacacagaacctttcaggatgacccttgaggataccggtttggctatcggtgcttttctgtgggccggattcctgtgagacaaggttcatcactaaaaggaaataaccgatgaatatgatgaccgtgccgtttcacggcaactctctttatgtggttaaccataatggcgagccatacgttcacatgaagcctgttgttgcggggatggggctagcctggcaatcacagttggctaagttaagacagcgttttgcgtcaactataacggaaatcgttatggttgctgaggatgggaaacgacgcaatatggtatccctgccacttcgaaaacttgcgggctggttacaaaccatcaatcccaacaaagttaaacctgaaatccgcgacagggtcattcagtatcaggaagagtgcgacgatgttctctatgaatactggacgaagggttttgtcgttaatccccgtcgaatgagcgtgatggaagaactcaatcaggtatgcgctgacatgaaacgggataaaaacatcgccagtttgtttggtaccgggctgagtgagtggaagtcggttaaagctgcacatgtatcaaaaattcgcacgttgataaatgaagcgaatctgctgattgattttgtcctggctgatacaggcaaaggaaaaatcacaaagacggattgatggagtggtgaccaatgatatcagacaaactcataactctggcgaagatcctctgtgtaattgtcggcatttcattttcactaatgctggttgctctttttctttccctgggctggatgatgttgtcttcgtcggggatgctggggtgagcataaaccgaatgctttccgcgtttaccgttattctgctggtggtctgtggtgtgcttagtctggggctgaatcattaccgcgataacgccatcacttacaaagcgcagcgcgataaaaaagtcagtgagctgaagctggcgaacgccaccattactgatatgcagcagcgccagcacgatgttgctgcgctcgatgcaaaatactcgagggaattagccgatgcgagagctgaaaatgaaactctgcgtgctgatgttaccgctggtcgtaagcgcctgcggatcaacgccacctgtccaggctccgtgcgtgaagccaccgccaccgcccgcgtgggcaatgatgccagcgtcgaactctctccagttgctggacgaaacgttctcggtatcagagacggaatcatcagcgaccaggcagcattgagaacgcttcaggaatatatccgtactcagtgcctgaaatagttttttcaatgcgttgtatcgtcgccgtatttccgcattaacagagaccgcagccctacggggagactcctctgcgcgagtgtgcgggaataatcaaaaacgatacacaccggggtttactgcgttaacggagcgcggcgttgtcccctcatagtcgcctggccggtgcgatggtggaagaaaccggaaatttattcaataaaaaaaactgccgggttgttacggcaggttatggcacatgcagaagagaatgttgttgttatgacgaattttttatcagattttaatgcaagtattcaattcgaaataaccgagcctgaattacaatatatgttatgaattattctcttattttttggagccattcaacaagactggcatggagtaactctgcagtaaattccttcatgaaaaatacaggaagaagacaccctgcatatcaatgggggtgacaaatgattccgtattcgaaagtcgagtctctggcagcgtgccggatgactgcacaacaaatcgctaactttctggatgttgatctgaaccgactgaaagaaaatcgggaagcaatgacaaatttttatgcgtccatccgtaagggcagagcgaaaggtgaagccgagctacgggcggcattgtttaagcttgccagaaaaggggatgcctttgccctgcgcgaactactcagggtggataaaaatcaggattaactgatgagcagaccggactggggggcgttgcagcaggaatatattgctgaatacacccgctccggtgtatctccggtggcatggtgtgaggcaaggggactgaattacgcaacagcccgtcgttacatcaaaaaacctccgaaaaatgcgcagacagaaatgtgcaaaactgcgcaacaaagtgcgcagaaaaaatctgcgcagactgcgcaaaagcggaacggaaaatctcagaaaaaaaagccagtatccgatgcgtgtctgaatgagggcgacgcggaggaattttcattctgtcccgatgaattcggcatttctgaccagcaggcaaaattcgccatgctggttgcgcagggtaaaaacctcatcgaggcataccgcctagcgggttacgagggaacgggaaacgtagcaagtgccgcagcctcacgtctgttaagaaatgttaaggtttatcgggctatctcatggttccgcaatcagtaccagaaacgctataccgcagacctggatttactggtgagccagttgatggccattgtccaggctgatcccaatcagatttcacaatttcgccgtgttaactgccgttattgctggggggagaatcacctctaccagtggcgagatatagcagaatttgacagggcagcagcgcaggcatctaaagacggtaagcctgaaccagaatatggaggcctcggctttgttgataacgccatacccaatccggactgcccgaagtgctgcggtgagggaacgggacagctttatatggctgataccactctacttgatggggatgcgcggcaattatatgcaggggcaaagctcggaaaattcggcgttgagatcctgctggaggataaggctgccgcccggcgcgaacttatcaagctgataacggcgacgaaaggaagttctgctggtggtgcaactgacagtcgcaatgatctggagcttgaaggactgaggcttcgcaacgaaaagctgcgcactgagattgaaaacctcaaaaaaggcgtgggtggtgagaataacgaaataattatccacaactctctgccgatgccgggagtggataatgtcgattgaaatctacctcccaaaacctcatgaggggcaaatagctgcatggacggcggcaatagaggaacgcttccacgcggtatgctgtggtcgtcgctggggtaaaacggtgatgctggtgaacatcgctaccagtttcgctacgcggaaatttgccgttcctaccaccgggcaacttatcgcgggtagggtggggatttttaccgcacaataccgccagtaccaggaaatctgggatgaaattagcgccgttctgcaaccgctgatcctcagccagtcaaaaaatgaaaagcgcatcattctccgtaatggggggcgcatcgacttttgggtaacggacaataacaaactggccgggcgtgggcgtaaatatcacgctgtgctgattgatgaggctgcattcactaaatcgccggaaatgctcgaggaaatctggccccgtgctatacgcccgacgcttgtcgattaccgtggctgtgcgtgggttttttccacaccaaacggtatcgacgagagcaattttttctacgcgatatgccacgatgaatccctgggatttatcatgcaccatgcgccaacttcatcgaatccgtttattccgaaagaagaactggaggaaacggaaaagaaatccgatccgcgcgtctggcagcaggaatatcttgcagagttcgtggactggtccaaagacgcgttactcgatgtcgataagctgctggtggacggtcagccgattgagatgccgccgtactgcgacatgattttcgcagtgatggatacggcgctgaaaggcgggaccgaaaatgatggtactggcgtggtgtatttcgcttatgagtcaacgtattcggacgagccaaaactgacgattattgactgggatgtgacgcaaattaaagcgtcattgcttcctgaatatatccccggcgtttatgacaaccttgagcgcctcgcgaaattatgccgtccgcgtctgggcagccagggaatttttatggaagacgccgcgatgggggcaatcctcaaccagaaggcggaaaccgaaggctgggatatgacgccgattaaatcggcactaaccagcaagggcaaagatgaacgggcggtgatggcatccagctaccactatcagggggtgtgcaaaatcgtccgggaggcttacgacaagaccgtttcattcaagcgcaccaccgcaaaccacctcataaaacaaatcgccggattccacctggcggataaagacgcgcataaacgtgctgatgaccttttcgattgttacacctatgggttgatcatcgcgcacggtaattacgcggcgttgtaaaaaatcaggatatttttgatggcagagatcgagattactggcggcctcggttcagcactgatgcgtattcttgaggctgaagaaattcagccgggaaccgatattggctatgaattgtgtaagctgctgtggcaattccatcctctgggcggaaaacttgtcgaaaaacccatactgatggcgatgtgtaagccgcgacagtataacgtggagacagatcctgacgagagggttgtacggcgtttccaggaggtatgggaacgtatgagggtcaacgagaagataaaaaatctgttttttctgtctcgttgctacggtgctgcagcgatcggcgtgggcaccgacagtgtttcatgtcgtgagccgcttccgacattcgggctgacagaagaggatgtgtatatcaacgcgtgggatccgttgaacgcttccggttcgatggtgactgaccagaacccaaacagtccgtttttccaggaagccaacaaaaggctgaagattggcggaaaagactggcatccgtcacgcacactgaaaatcttcaacggcacaccgatttatctggagtttcagagttcatcgttcggattcaccggacgaagtgtgtttcagcgcgttctttattccctgaaatcctatatcaacacgatggaggcgaatgatctcgttagtcagaaagcgggcgtactggtagctaaagttgtgcagaacggttcgaaaatggacgggatcatggctgctgccacggggcgtaaaagggaaaacgtgaaagccgccaaaaataaaggcgtgttgagtattggaaaagacgaagacgtaagttcactgaacctgcaaaacatcgacggggcgctgaatactgcccgcgacaatatcattgctgatattgccgccgggagtgacgttccggccattattatcaaggaagaagcattcagtaacggattcggtgaaggtaaggaggactcgaaagccatcagccagtatatcgatggtgtacgccagcagattgaacctgtgatggattatttcgaacgcctggtgcagtacatcgcctggaacgaggaattttatcagtcgctgaaaaatgattacccggacatcataaccgaggactataaaaccacgttttaccagtggcggcgcgagtttaccgcgacatggcaggagctggtggaggagtcgccggacaaacgccgggaaagcgacagtaaagtgattcaacaggcgatagcacttttctctgccgtgtcgccacaggttgatcctgaaaaccgtgccgccgtcactgaatggctggcaagccttgttaatgccacgcaaacctatggcgaagctccactcatcattgatgtggacgcgctggcgaattatgaaccaccgaagcaggagacgcctgatggcaatttccagccgggcggtgagggagaagaaacggatcaggacgctatatgaggttctgacggatgccgttaactactacgtaaatcacgggtgggatagcgaaaaatcattgctcgaatggtgccggaaactccgtgtagccgctcagcgagaaacccctgatgataccgtagccagaaaacacctcaccgctatctacagccgtcttgtcatcgacggcggggcattacgggatcagcctcctgacggccctaaaaaaatcactgttgaaaaactgaaacctgagtttcgcaaggaactagacaggcgaattttcgccagtgccaacctgataaaactcaaccgcgaacaggctatcgagaaaaccatacagcgttttcagggatgggttacgtccattccgcctgacggggtgagcgaaattgatcgccgggaagtgaagtccggttttcagaagtccgtgaaggatatggattttatcagtcgccgggtggcaattgaccagggacataagctggcgagcaacgttaagtatctgctggctgttcagagtggtgcgattgctctgcgctggcattctaactggcggcgtccgggctacaaataccgacaggaccacaaagagcgcgacgagaaaatttatctcctccgcgattcgtgggcgctggagcaggggcttattaagcccgtatatggtttttatgacgaaatcactgctgccggggaggaggtttattgcagttgcgatgctctgccgatctacgcccctcagaaactacccgacgaatttttaacggagaagggcaaacgtgagtttaaccgagcttgaagtggcagaacgcatcagggacggaaccgtaccgtctccggtgaaattctccaacatgtggttggtgaatttgcgcataaccggaaccgggcttgcctatcgcgccgggctgaaagagcacgtctggcgtgatccaaagctctatctgaacgaggagtttttaaggcgatgcaatggccttccggttatcacaaaccatcctgacgacgcagttctgacggaggaggattttaaatcgcggatcgtcggtagcgtcatgttgccgtatatccggggtgatgaggtatgggcggtgtgccgcgtttacctccagagcattgttgaagaaatcactgagggggatgtttcgacaagtccgtcggtggtgttcaacagcacatcaggaaatgtggaagtacaggaaggtgacaccaattttttaatcgagggcgttcctttcctggttgatcacatcgccctggtgacgaaagcccacggctcgctgggcgtgtgggataaagaccggatccccgcaggggttgaagtgacaaacacaggtgaaatcgagatggaaaaagaagaactccaggccctgttacagggggttgtgagcgatgccctgcaaggcattaatcagaaaatcgatggtgtcgttacgcgcatggactcactggaacagcgggacaaagcgcgggcggatgccgaagagcaggcgaaaaaagagaccgaagaaaaggccaaagccgatgaagccgcagaggaacagcgtaaagctgatgaagctgcggcaaaggaggcggaagaaaaagccaaagctgatgaggcggcagctaaagacgctgaggagaaagcaaaggctgattccgaagcagaagaacagcgtaaggccgacgaggaggcagaaaaagaacgcaatgattctgccctggcagaagcgcaggcaaaagccgactccgcattcagtgcctgcggtaaaaacgcgccagcaccgttttctggtgaaaatgcgctggactaccgcaagcgtgcgcttatcgctatgcagaaacactctccggcacataaggacgtcaatattcgcgcgattgcggattctgcaacgctggctgtgcttgaagacgcaattttcagtgccgcccgtcagtccatcgaaaaagaaatgatgagtacgcaggggcaactgcataaacgcatccgcaacgacgaagccgggcgtcgcattactgaatatcagggcgatccgaacgtctggctgagtgccttcaaaattccggggcgtcgtctggcaaaaattaacactcaagggagcctgaacaatggctgatattaactttcatccgtttaaaaaccgtggggcatttggtggcctttttaacgtcgaatcccgtgggctgatgcagggggatgcgcaggatgatccggcaattcgtctgcaactttgctccggacgactggacagcaaaatcactgaaccggtatggggtggtgtcggtgttatcgagtgcatcgctcccgcgaaagacagcgttaacggggcggttatcaagcaggccacgacggacgcctgtaacgcatttacagtctttaatcaggcatttcatggcattaccacgccggataatccggtgccgttatatctcgcgggtggctttgttcactattaccgcgttggctcaggcgcccgcattcctctcccggtcagtgcagaagttgttgcgttggctgatggcaataacaccgttgctgccagtggttttgtgtgggatctgacgaaaaacgtggttgatgtttattcgggaacgcccggagctaacccgaaagtggacattaagttgctgatggtttcagttgacggaaacctgacggtgaaaaaagaggacggcggtaacgttgtctgggaaatcggtaagccgtgcggcctgtttttaatttaaggggatattaattaatgagcgcatttactcccgcgactactattgtgtcgccgtcaatggtgctgccggaaatgatcgtgcaacagagcatggcttccggtgcgtttgaagtcctggctggcggtgctccagcggtaaaaatcagttccagtgatttgatggtctatcagaaatatctgcgcatgacctcgcaggcgcaggtcagccagtctctgccgggccagttgccgtcttccagtatctctggcggctatgacgggatgatgacttaccgaatttcttcccgttcgcaatacagctatctcgatactgatgcagcagatcgctggggctattctctgattgaaggcctgcgtctggctaaccgccagggacacgctcaaatgttgcgtaatatgctgctgtatggcgtgaatgcagctaataacgaggggatcaccaactcaccgaacgcagtgacgctgaatctgggcaacgacagcaaaggcaatgattcttacaccacctgggattccggcgagatggctaaatttatgcttggcctgattgctgaccagaaaacccgcatgttgctgctggggcagccattaacgactgtcattctgagtccgcagcgattcatgaaggcgctggagtggacaggaattgttgagctgaccagttaccagcgtcctggtggcggtaccggaacggtgggaacgatggttaaagacgtcgctgataaggcgacaggcgatgacatcattttctgccaggacgacacgctgatcggtaaaggtgctggtggtaatgacctgatcatcgttacgaacccgacgattgaggtgccggaagcgcgtcacgccattaacaccaatatcttctccacgctggttccgaaccagcaggccgttaacgtgatgttctgcgacatggcagcgccgacggaaatcccgtcccctatgccggatggcggcctgaccacgttgtataccatgcgcgcgacgccgggctggaacttccgcccggaggggatcaccctgttgtctgccaaatacgcataaacgttcaatctgataacgcggggagctaaatgctccccttttttgtgggaaaaatttatgaagctctacatcgctaactgctcacgtcagccgcacacgttcaactacaaactccccgaaaaaacgcagtcgttcggtgtgacaattccgtccggacgtcagcatatgatcgaaaatcagcccgatattatcgaccacatcatccgacagcatgagccttacggattccagcgttgtgacaaggtggacaagaatttttccggtatctgctattccatcgataaacctgtgagcgtcggtcgcattgaggattgcgcggagcagaaaacggaaaatctggaatccatgtcagaggaaattctcgcggccagcgccgtatcgctgaataacgcagtggatcaggcggtgattcagagcggcgaaaaacctcaaccggggggtattgaaatggaaattaccggggaagcggttaacaccgaacaggaaaatccgcccagcacaaagcgaaatattaaggttaaaaaataatgaccctgcgtccgtcactggaggggtttattcgctttgttcgtgacgacatgaaagtaccggttcacgctattgctgacgatgatccgacgctggaatgttgctttcagtctgcgatggagctaatccctcatgatcaggggctggagcgtttacccatcatctatgtgcgaacggtttataacgctgccgcctcatttctcctgaatttcgctcccggctcgtggtttgccgacctgagaaaaaaactcaaccttgggaaactggctaccgggcttgtcagcgcggcagcagaccaggggacatcgggttcgatcaccatcagcgacgcgctgagtaatctgtctttgctggatttgcagatgttacaggatccgtatggacgacaggttgttgcggtgctgatgcagatgggcacggtatgggggtacacgccatgaaactttgttttggtgttgttgaccagccgtatgactacggtgacgaaccgggaaaaaccacgttcgacgtggcctgtgaccacgaggagcgatacgaaatttttacgcacttctgggaaatgcataaggacgagattatccaggaggcaggtactgaactggcgtaccagttggtcaatcacttcaagtataaggctccgctacctggcgagcattttctggaagggaccgggaagattttccatatttttcttgaaactgaagaaatggccgggatgacgattaacggaaaccctgtgccaactcaggccgcgctactgggcgttaactccaggcttaaggataaatataccggagagcggcgtccgtcattcatagacggcggcctgtttaagggcagctttatagcgtggatagataataatgccgagtcttgaggaattagccgaacagcacagttcgcagctctcgtccgttcttaaatccgcagttgaaaccatctcgtcagaccaggaaatcacgttcaggctctatgtccggcaggttctgccgctggatggctttgtctattgggttaatgcggaaatcatcagttgcgatgaactgtgtcgcctgaatattgagtcaccaactcgtctgaaaatcaaaggcagcctgcatcgtcaggttattgcgattcaggacgagtctgtctcgaaggatgtgaacaacattattttcacgcctgttcagcaggttgatgattttaatgtggaaaatcccgacgtgatctatctcggtgagtacggcggcgtccagttcgctttttctcgaatggagagccgctatcagcagtcgggtatttttcattatcgcggcatggcgattttgccaaccatgcgttcccagattatcgactgcgaggaggatatcagcgacgagcagatcatatccaacagcatcccgatctggctgcaaatgaaagatgccgcgaccgtgtatccgtcttacctggtaccgcagaaccttcgccctccgtatatcgcggtggatgttcgcaacagtattcctttgcaggtggctcccgttgttttcggtggtgagcgattccagctcgtccaggattcggttcgcctgacgctttacggattcagcaacaaaatggcgctggatcttatcgactcggtggtgaacagggcgctggaggaggaaaagtttggtgtaaccaatattccggtggttcaggacgcaaagtcgggacaggttgaaatcaacgctctggcgaagaaaaaaattgtcgattttgacgtgaattactaccagagcaccacccgggaaatatcccggcagttgattgaaaaagttatttgtaaatatgaggttaaataatgggatttaatatcgtcacggtgaatgtgtcccagaccatcggggccataccctcgaatctgcaacagatggctgcgattctctcgtttggttccacgactcatgagccgggaaagcctgtattactcacccgtaatcaggatattaacgatctggttaaaaatccgattgctgcgttgtcggcggctgccgcaggaaaatctgcggcaaacgtcaccgttacgatgacgcttccggaagggagtaacatccgacgcgaaaacagttctgaggtgaaaattgtggtgtccgggtgttcgcccgacgcgtggaatggcgaatatactgctaccgtcacggatgaaaaaacactgacctggacgattgctgattctcagctttccggttcgccagtgacacaggggcagttttccattgtcggcagtgaaaatctggtgacggcagtaaacacgttttttgcccagggaaattcagtcgggatttacctgctggagctgggagtacagaaaggcggggtcagtaaggaaatcgctgcactgaaagcttatatggaagatccgctcctgcgtttttatgcgtatctggtgccgcagccgtgggatggtgacgcagaatttatcagtctggcaaaactccacaccgccaacgaagcgatgcagtatttcttcgtgctgacgaaaacgccggacgacacgaattacgtttcgccttatgccggtattaagtcggttattgtaacggcggatgatacgtacccggcgacaaacgcggcagcagccgtaatgtggaactatgtttccgcatcaccttcagaaatcaacaaggtgccgccgatggcatttcgctatctgcaggcggtaaacgcccacaagggcaaaaattccattctggccacgatgacaaagcagaatattaactacgtcgatacgggtgctgagggtggaatttccaacacgattctggtgaaaggcgttaccagtgacggtaacgatatgacgtactggtattccgtagactgggtgcagattaacgtcgatatgcagctcgccaacacggtgatcaacggcagcaataacccaattaacccgctttactacaaccaggacggaatcgaccgtctacagcaggtcgcacaggcggtgttcaatacgggcgtatcttacggccttgtcaacggccagcctgtcgtcgatgcagtgcctttccgccagtatatcaacactaatccgaatgattacggtatcgggcgttatgcaggcctttcggcctcctatacgccgatgcgcggatttgtcgaaatcatttttaacatcaatgtgacaatgcagctttcgtgagggactgaaccgtgcctaatccaatgatccccgttggcacccttaaccgggttcgcgccagcgttaaattcacctctcattccgaactgaatgtgtccgcctcatttctggcaaaagaaggcgtcgaattgtcctttcagggcaatatcacggagtttttacccgctatgacgggagccgtgcagtcgccgcagccatacatgattttacaggcgcgtgttcatctgttgcgtagccaggcgcagggaaaacaattcaaggcgcaatgggaaaagaatgccacgatcggcgacgcaaaagtgtatagcgacagcacggtattcggtgacttcgatatctataacacggcgatcaccaacgtgcaggatatgaccttcgccgggggcgagccgggtgtggccatcaccattaccggtacgtattacatcaactctgaaatgtgggatttggtatgaaaatcgcgcgaaatttaaacctgattattcctgtccagaccgagaaaggtaaagcctggattcacgccacgccgatcagcaaagaggtgtttaaagagcatttcttcattctgagtaaaactttttctgccattttctccgaaggtcttggcgtcgttgccgggccgcgcgttgcttttctgatgctggagcggatctcgcgtgattccggtatctgggacgatgataagggagttcgtaatacgctggtgaacgaaataattcgcctggcaaaccttgtttatccggtggagggcaaaggttacgacacaatccctcttgatatggcgctggagcgtgaaatcgttgagctggatgatgttgcgggtgaactcgttttttttacatgcgtctcgtcgataaacacaccggagcagacggaacagatgatgctggtagtcagtggaatgtggaacagtcgcacttcatccttgagtcttacggactggattgcttccttgccgacattgaagtctgccgccagttctggcgcgacggtgaacacatcatcagcgacatcctcgactactcagccggagccggattcagagacatctgtgcagattccggtttgaatgtaaaaacagcagctcagtttcgtgagctgctcaaactcaaaaatcccgcaggagtattgtgatggctggtaaccagatgccagttctgacgctggacgttaatgaagaacacctcaagcggcttgaggcgatatttgaaaagtatcgcaacggactgatgattggccctgccgggacaccgcttaaaatgccttcaaatacaggtcagggaggtggcgcccggcagacaaccacaggcggagaagccaatcaggctcccaggaaaccatcttcacctgcgcccaccgatggacgtttaatggatgaaaaagggcgctttgtcggtagcggaaaaacacctgattcgctggtgagcaactataaaggtcgcggcgaaacgatgtttgataagtatctcagtagtctgggtaaaaacgccaaacagacgctgaaaacttacaagcagatcaattctacgctacggacgaccacttcgagattaaacaacctgtttaaaaccaccgtatcgtgggggacaaaacttgcggttatgggcgttgccgggccgttcggctttggcatgatgtcccgtagtgttgtagagaaacagaaaaatgctgatgaattgcaggcaacgccaggagagttaaaggcggcagaaagcacttattcgccttatttttccggtgttggcaatgtgctcaatacactggcagcagcacaaaatgatatatcgcatcctgcccgcgtcggcctacttaatctggggctaaatcctgataaaaacgcgactgaaaacctgcctgtattcctgaaaaaggttgcagcgctggcaaaggaatatcagggaactggtcttacccagagcaatttcagaggaatggggcttggatgggtaaattttggtcttactaaccagttagtcaaatatcaggacaaaatacctgaactgaacaaagagttttcgttacgtgcagcacaaaatgattcgttactgacctctgcacatacaagtaaatatcagaatcttaccagtaacttagaaaataactgggatcgacttaccagtgggtttcagggagcgatgtcgggtaattctgaacaactgattggaatatctaatggcgtcacgaatgctgccctgaatttcatgaacggtgagaactttaaaaggattctgacagatgtagaaacggggctggataaacttggtaagtacgttaatggcccggattttaataacgacctgaacaattttgccgaaaacgttgcaaaggtcaccaaagctcttggcggatttgttggctttgcggttgaacatccctggctttttggggccgcagtgcttgccgggccatcaagagttggtgctgtggcagctacaacaaccggagttgccgcccgtgttgtaggcggaagccttctaggggctacagctggaacagtagcaggattggctattcctacgaataacacacctaccaccagtgaggaaatgaaagggctggaaggccgttttaattttgaatattttaatgaagtgcaggagtggcaaaaaaacaatcctggcaaggtctggcctggaggattgcagaaatattcgaacaatgtaaatagatcaacatatttatccagagggatcaggaataacaatcccggaaaccttaatttcgcaggacaaaaaggggctactctggaatcagggccaaatgcccgttttgccagcttcccgacgatgctggaaggtatcgccgccttagatcggcaggtcatgctatacctgaaacgaggcaaaaatacgattgatcagattattgatatttatgccccttcatctgatggaaataacacatcgtcctataaaagctatctctctcagtacactggattaggtgttaaggagaaaatcgatggttctaattttgagctaatgagaaagctaattcagggcattattaaccatgaaaatggggccgccgctcgtgctgtaagtggcgatgatgtgatgcgggcgctggcaatgaaccgggggaacgtatattcaccaaataatgcttctcaggtaatcaggctcgaagttcaacaaaaaccaggttcagatatactggcacaactcgccggaatgcaacaaataccggggtaaaccatgtcacttaattactttggacaagctttcaaactggcgtttgaagtatcgcccattcttttagttgatggcatagcgtcgaaaattcccggcggggtgatgccgattgctgttttgaccgaaggcctaagcattgcgaatggtctgctgcatggcgagatacgcacacgcttgatggcggcatttaccccgatggcggggacaacgttagtccagcaggatatttgcaacctgaatttctataaccaggtaacggcagcgaatgcgaccgtcaggaagcctaaccgggtagtcatgcagatgatccgtccggcatcaacggaggacggtggctacaccacgaagggaatgacgttcacggcgctgaaaatggcgcttgatatgcataatcagtatggcggttgttacaccgttctgactccgtcgtttatctatacgcgttgcctgatgcggtcgtttatcgatacatccggtttctctgagcagaacaagcaagtgcagcatacctggcagattgaatttgagcaaccattgtcatctgtcgaacaaacagtaaagacgctggcgagcgttctggataaatttgataaagggatgcagtcagacgggccgctatcgtggtcaggtattaagaaccaggtcgtgcaggagtttggtattggcttatgacaacgttaattcctttcaaaccggacgggcgaggtccgtttcagttcacggccagaattggagaatatgaaacattcgcccgcgttccgtttaatctgtatgcaaatcgttactacctggaactgaaagacagttctggcgacgtgattgtgtacatgccgttgatcgcgtcacctgacaattacgacatcaatctggcgctgccttgttcaccggggaaacttgtttttcgcgaaagtacgaatcagtttgaggtttcgtaatgcgttattaccgactggaaattattaatcctaaaacaggcaagccgcctgtggatagcaatggaaaacccattggaccttttgataccagtgaaacaccaggatgtggattgcatgtcgaatttgactttgaagtaactggtttggatgtagtctgttcgggtacgatgctgacgatctatggattaccaattgacatgctgaagcaaagcgtgagtttgcagggttgtctggtccgtatgaaagcaggctttgttcagggattaccactggcaaataaggatcaacagggggaggtaatctatggtgaaatttatctggcctatgccaactggatcggtacgaaccagactttgaacctggtaataaatccaagcatacgcaaaaccgatgacggtaaacctttttcaattgaggggcagggggaagcaggggaaagggtaggcgatgttttagtccgcgctttgcaaaaagcatatcccaataaattgattgattgcacagtcagcgacaacctggttttgccagagccgtggacgggaaaatatacggagattggttctctggctatggtcgtaaaaaacgcctctattgcgatgatgcgtaatgaaaggtatagcggaatcgccatcagtattctttccgacagaatacgaatttacgataacgcgtcagcaaagtggggtgagccaaaaacaattcatgcccatgaactggtcgggcagccgacatggatagcaccgtttaccgtcagtttcaaatgtcctatgagaggcgatatcagatgtggtgatgtggttaaactgccggaggggctatattctggcgctgcgtcgattgtgatggctaatacaacggcacccagcgttatcgcaaaaaattcgaccacgttcaccgggaaatttcttgtgaaatcggtcagacacattggttcgtatctgacagctgatggcgatgcctgggtgacggtatttgaggcatatgctgagaactgggcgagggtgtaatgtcaaacgctcaaaaattaccgtttctccgaacgctgtcggagatgatgaccagttctggcaaccagcaagccgagcttaaaggacgcgaattgccctgccatgttgtcgatgtcagtgggcagatagtgaccgttcagtttgatatgttgccagaggggatcaactttccgcagataacaatccctgtcgccacattcccgtatattcgttacccgatacagccgggcgatcgaggagtaacaattgccgcagatgtatcactgcgcggtgtgtccggattgggaaccggtatggcgacgctctcttactcgatgtcactcactccactgtttttcgtgccactggcaaacaaggactggtccgacgaagatccgcaaaaaatcgttttgtacggtccggatggcgcgatcctcaaaacagaggacggcagtagctcggtaacggtggcaccggaagaaatcaggctaaattcgaaagctgtttacctcgaggccgaagatattttcctgaacgggaaaattcacctcaacggtccaatcgtccaggacaaagcccagatgaaggatacaacagcttcgctgattggccctctcaaggtcgagaaggatgcagttatcaacggcgtgagcgccagcggccacagccatgatgtgaccggcgttcaaagcggcaacagcacgatcacgtcgaagaaaccaaatccgggttaataccggttcatttcactttaaattctatccataaagcgaaagccccgaactgttgcagcagtcggggctttttgtttctgaccttgaataaggcaaggagaagtcgtgtttgattttagcaaactgattcgggagattcgagttatggctgaaaaattatccacctggaagtttttgcttatttggttggtctttctgattctggcgtctggttattttgttggccagatccgatggtggtgagggcacgatgagaacatggggccgcgtcactgacgcgaacggcaacaaaaaatgggttgcagtagaatctgacaccagcggtgatttctcctacggctggctgacgacgctcattcagacgttaaagctggggttgggggagtcgccgttttacgcgaattacggcattcctgcgcagcagtgcatcgtgcagcagatttacccggactactatgtgaacatggttcagcaacagtttgccgggtattttgcatcgctggcaatttcaaaggtagatggggcagagaaccccacctataacatcgatgttgtgttttttaacggaaccagttaccggacgcaggttccggtttgaggcaagttttcgggtatcaattgggccagtggcgtattaagaagttcatcgcgtggcatgacaatccatccacttttgcgtagtaagtgaattgcccattctgtggttataactgagcctgatttgtggtgctcaatgtgggtaaccgatccgtttctgacgcgcatgatgatgtcaacattcagagggggttgtgtgctggtagtttcttcgcgtagtttcttctcgcactcgatgaagtatcggcggatctggcggcctttttcgttgcgttcgaccatagccagctctttggcggtgtccagggtgagatggtagtctttggctggtctgcctctaccgattttttcccgattttgggaaataatcaaaaagtcctgattttctacgaattcatactcgctgattcgttcggtaatccaagtggcaaagcgtttacctacttcgagaaaggcatgcagatcgcgagcgttgcatagaaggatggtttcgttcgaaatggttccgttgaacacggtgatgagttgggtggtcatagtaacctcttttggcttttttcgaattgccactaacgtagtggcgccgggaggttcgaaacggcccaaaagataccgcggacttattcccctttcgggtgttgtattcgtcgccctcccgacattgatcggggttgtgatcgcacatattgccatcacaaaaaaaggcataaaaaaaccaacacattgtagggtgctgggtaatcagcttttgggggaggtttcgacgcctcatgcgtccaatcatactcaactgggcgcggttgtaaagtatgaacttgaacagacattaagaatgggtaaaatttgtcctcctgttttataaggagattaaggatgtctaagttaaaattatttgtagtgtttacctttttattacaaataggaactgcgaatgcagtatcttttgattgctcgaaagctaaatcatattctgaaaagttaatttgcaacaacagtgaattatctgaacttgatgataaattaaattctttatatcaaaaagtaaagttagagagcactgataagaaagcttttagaaaaattgtttcagacttgtggaatgaaagagagaagtgcaaaacagaatcatgtgttcgacaatggtattctaatgcattcagggaatattcatctttaaatgaaattaatgagaacataatcaatgaatcagagaattacgctgaatggtatattgatggtgcgctgataatattacctccattggaaggtgttagtaaaaatagattcctgatgtatggcgatgatggaacaatagctatttttattgcttcaaaatctaaaggtaatggattttgcgataattcagtgcaaattgatggcccattagaatatccaccaattttgattaatggtgaatattataaaacttataaatcatgcttttatggaaatggttttatagtgccaaaaactgaaattggtaaagcagttctgaaagagttggttatgaaaatgaagcctataaaaatttcttttggagacggcgatgaatttaactatcctccatcaaatgtaaaaagaatgcttgagagggtggaaaaaatgaaacaggcaaaataagttaacttaaaaccgcttcggcggtttttatataggggatatatgtcagaaataccaattactatgaccagtgcgggtgcgcagcctacgccacccaatgatttgctcgcgaatcttatcaccagagttgctgaaaaagtacctggatatacagccaaccttccggcaggacttattacagaccttgccagcacggcagtaggggcgctggcattaatagaccaggcgcgggtggaccttattaactctgtaagcccatacggcgcgaatattccgttactgatgcaactcggaaacatatatggagcacagaagggattaagtacaaatacggcggtatacgtggtgtttgaggcgttaccggggtttggtatccctaaaggatttgtggttggtgacggtaactaccagtatgcagtttcccgcgatacggtggttccggaaagtgggcagactgaaccagtctactgtgtggccactacgtcaggctcatgggctgtaccggaagggaccgtgacgcaggtcattacatcagtaccaaaagaccagcctgtaaaatgcacgaacctaaccgcagggatgccaggtcaggaggcgcaaacgtgggcatcttaccgcgccgaagtcatggagtccggcatgtttggtgtgcagggaacaccggattgctttaaagcgatgctcaaatcagtaaacggtgtgcgagaaaacctgatttcttttcggcagtcgtcgctggggaaatgggttgcggttgttggtggcggtgatccgtatgatgtggcttatgcgatttacaaatctgtaccggatatttcgaaactgaccaacgatgtaagcaatccatccggtgcggcagtggaaaaacgcacggtttcaataaccgtttcgccggacgtttatcaggtgccgttcgttatcccgtcatcacaaaacgtcatggtgctaatcacctggaacacggtgtctgatgattatgttgatccggcgggtattgctatggctgtgcagcaaaacgttgctgattacatcaattcaattgaagtcggacacccgataaatcttctgcgtatccaggatatttttaccagttccgtcaggttgctggttgatgcgacgttgatctcaacaatcagtgtgagcattggtattaacggccatattgttcttccggcgaaagacacaagcctggtttatggcgatacctattcctatttttcaacggtggcatcacaggttcaggtcaacaagcatgcaatatctgactgagaaaattctccctgcttatccatttgcgcagtacagagatgatccgaatgttgttgcgttctttgatgcatacaatgaaattgctcaggaatacctcgattcactcaacaatctggcattgccatgctggacatcggaatcaataaccgggcaattactggactggattgcactcgggatttatggcgttgaaaggcctttactacaggtttccgaggaggctattgcacgcggcgcatacgataccattgaatacaatacgatcccgtatgcagcaatgcggaattacgttccagggcaggcatcgtatgtccctgatgattatttcaaacgaatattaacttggaatttttataaggctgacggttcgcatttctgcattgattggttaaagcgccgtgtggcacggttcattcatgggaaaaacggaatagacccgccattgcagcatacttttgatgtgagtgtgactgtatcggacagtgttttttctattcagataccagagtatggcgatggcataggctattttcttaaagatgccattgaccagaaatatgtaaaactcccttttatttattcctatgcaacaacggtgattcaaaaatgattcttggatttggcaataacgttgtttcagcactggctggcgatatcacgacgattcagactgatattccggtgatgccgggcacgggagctaaatttgcaaaattgctttctgccgattttgaaaataaatcgaacgggcaacgcgtctatgcaaaaattacgcttaccgataataaagagtctgcatttgagatttgtcacctggtatcggtaagcggtgatgtgttgaaagtcattcgtgggcaggaaggaacgaccgcgaaaggttggtcccttaatgacgttgtggctaactttgccacgcgtggttcggaaaaccatttcgtacagatagcgcagcttcagagtggtcattatattgcgggagttgctggcggcactgcaaacgcgctgactctggagcttcccgcgacgttttttgttaatggaggtacagactggacgctacgaaccccgattatcgttttccccgttcagaacaataccaacgccgcaacgcttcaattgacactgggcggaaaggttcttggtacgtttccactttataaggggaacaagtccgagctggtggcgaatgatatcattaagggtattcctttgatttgccttcttgatagcgagaaaagctatttcagcgtgataaaccccggcaatatctattcagattttgatctgcgatatgtaaaaaaatctggtgatttgatgaccggggaactgaaaatccgtggtgttaatgcactgaggattttcaacgaagcctttggtctgatttttcgtcgctcggaagagtgcctgcaccttatccctaccagtgaaggtcagggcgagaatggcgatattggcccactgcggcccatttccattaacctgcgccagggcgaaatatccatgtcgcataaagtgtctgttggcggcggttctcaggtcaatggtgcgctgggtatcggcgttcagaacgcgctgggtggaaactcaattgctttcggagataacgataccggcctgaaacagaatggtgacggcctgctggatgtttatgccaatggtcagcacgtattccgttttcagaatggcgcgttacaaagtaaccgggcagtgaatgtttcaggtcgggtaacaccgtcagactacggaaactttgatgcccgctatcagcagcgaaatggcggcgtgcaggatgtgcgttatggttccgaaatgtattacaacccgggaggtaaccaggtatcctggacatttcgctcaccttcaggccacgggttatccggtattaatgtgcaggaaaccggaagtaattcggcagataacatcggcggcgtgtattaccgtccgcttcagaaactgattaatggcacctggtataacgtggcgagtgtttaacaatgttacatttaaaaaatattactgcgggtaatccgaaaaccgcggaacaatatcaactgacaaaacaatatggtgtcacctggcttttttcggaagacggcaaaaactggtatgaagaacagaagaactttgccagtgacacaataaaaatggtttactccggggacgggcgcgtggtgtgggtcggtaaggatgtgacaggcattgaaccccgtaacgccagtgttattgaagttccggatattaccgccaatcgccgtattaccgcgcctggttactggttctaccgcaatgatgaatttgtttttgactacaaacttaaagcggaagatgagcgtgatgcactgttaaaacaggccagcatcatgaccagcgaatgggaaaaagacctgctgctgggattaatcagtgacgaagacagggagaaactgaaagcgtaccgcatttacgcgaaatcgctgcaggcgatggatttcaacattatcactgataaaacctcatataacgccattgaatggcccgtctctccggaagcctcttcctgatttaatttatcgcgagaaaaactatgtctgtagtgatatcaggtgcgctgatagatggcgcaggcatccccatgtccggatgccacataattctgaaatcccgggtaaacacctcagaagtggtgatgcgcacagttgccgacgtggtgacaggaaactgtggcgagtactgttttaaggcgcaaaccggaaaatattgcgtatatctgaagcaggactggcgcgacgagtactgtgttggcgacattgctgtatacgacgactccaggcccggtacgctgaacgactttctgactgcccttgatgaaggcgacctcaaacccgacgtggtgaagcgctttgaggaaatggtggcgcaggcgcagcagagcgcggaagcggcagcggaaagcgaacaacaggccgggcaacacgtcgctgatgcgcaacaaattaagagcgactgcgagacgctggcggataacgtacagcagaatgcagaagccgttgccaaagataaaaagcaggtggcacagctggcatcatctgccacacaggatgccgcccgcgcagagcaggccgtcaaggatgccgacacgatagtcaagaaagcggtcgataaactcggtgaagctgcaacgctgaccggcgaggcaaaagccagcgccgaagcggcagcaaaaagcgagcagaacgcgaaacagcataaggacgaggcgcaacggatagttgatgacctgaagggaagcaatgcttccacgacagaaaaaggcctggtgcaactctgtagtgatacggacaacgacagcgaagagctggcagccacaccaaaggctgtcaaaaccgtcatggacgagacgaaaacaaaagcaccgctggacagcccggcgttcaccggcacgcccaccacaccaacaccaccggatgatgccgtcgggctggagatggcgaacgtggcgtttgtccgcaaactgcttgctgcgctggttgactcgtccccggaagccctggacacgctgaatgagctggcagcggcgctgggtaatgacccgaactttgcgacaacaatcatgaatgcgctggcgggtaaacaaccactcagcgacgtgttaaccgcaatcagcaatctggaagaacgggcagataaccttctgtgctttaatcaggacgggaatgcttcactgtctccgctgtcagaaaaagcccggtcactgctggcgcaggccacagtggaagccatgcgcaatgagcttgagctgaaaagcgcagcggtaaaggacattcagacagacctttacgacagcacggaaggccgtgttgcgctgccgggggcgttcggatacgggcatgtgttctcttcgtcggaagtggtgtatttcagcgccaaaaatggccctgccgaatttctgaaatgggtgttcgaagtcacccccgggcgttacgcggtaacacaatatggagggagtggcatttcatataatcccatcattgcttatgatggggggcaaccctatttcagggggcttgtagatatagaaatacgatgcggaattggttcaggcggtattgaatcagaaacaggccggtggataacgtttcatggtgatgcagaatacgatgggggattcggtgaaggtcctgcgaaatatcaggtactggttaaaaaatccatgcgtccgccagacctaccaaaagcatggtcgcggttgttctggtcacgtaatcgcctgatgcaactgttgtatgcaacagaaaatacatcaaagcgtcctccgttccccggaggcctggttcttgctgcatacctaccggacgatggcagcagtgaggttacgttacttcgtgcacaaggcgtgtcaggctcaagactccggcaggtggtctttgaagcggagtatcgcacgtcaggatttagtgctgctgcgaggtcatttgtctacggggataccctgcctggtacatatgtcgctttatctggcggcccggatgttaagttttataaccggggcttagtttctttgtttgtgaggattgcatgatgcagataaaagagattaccagtccccgttataccgaaaatggtgcggttgactgcgaggtgttatttgaaggtgaaacggaattcgtcccgtataccgccatgcaggacgatagcgccccgacaggccagcgcatctgggaagagttacagagcggcaaatggggtgaaatcgccccgttcaccgtcacgcctgaacttatcgcagcagcaaaggatgccaaaaagcgggaaatcgaggcatggcgtacagaacaggaagcacagccgttcacgttcgaatggaacggccgcacctggaacgctggccccgactcaatggcccgtctttatccggtagtaatggcggcgaaatctgacacggcgcgggacgttatggcgtggggtgacgccgataatcaacaggtgaaactgtcaatgcagaaactggatgagctgcttactgcaatggtgcaggcacaggtcgatcgcaacgatgagatttatcggcgtcagcgggagatgaaagaggaactgagcagtctggaggatttgaggtcggttaggaattttgtagtggaataacagaagccgcggcacgtcgtatgcaagaacgtaccgcggctggctggataactttcgatagtgcgagtattgaatgatttccagccgatacagattctattggaaagtattcatgggtgccaattgcagttcacggattgggtgttttaggatttttttagtggcaaaaatggggcaaaaagccgcaaaaggggcaaaaatggggcaaaaaaagagtgggttatcgtagcttattgtagttgttgatgttgcttaacgtattgaaaaataaataaaattattatgcgtcagatagttgtgatttttgcccttacttgttcaggttgtattgttctttcttactaatttcttgattttgcgacatttaaaagcgactcaattcgttatatggcatcagaagagtatgcgtcatgccggaacgcccagcataagaaatctgatataaaaaactgtggcgtgtatggtacggattagaggggaaaatgtcagcacatttgcgaaatgaatcaaaaagcccgcagcaatgtgcgggcgttagtgtcagcgcacaaccagcacggagcactctgcgtgacgcactacagctgcggcgttggaaccgagcagataagtggtgatatccggtcgatgggaagcaatgatgatcatatgagcggggatcttcttcgccaattccagaatgcggtctttgggcgagccttcctcaacatggacatgcactctgtcggttggcagtttaaattttttaatgatctcttccagttgcgatttggcttccgctttcaggtcatccattgccggtaattctgcggaatacgctaaacccagagaggcatagtagggcagagaaggtattaccgtcaggaaatgaacctctgcatcatcaatctttgcctcttcctcaacgtggctaatcacgcgttgagttaattctgaatcggaaatatcgatagggacaagaatcgttctgttcataaaacctcctgttttagtatccgcataaagtgtaacgccagatgacactttttgtgtaatgacggagttcacatttttaatttagatcaaaggaggaagaataagcagaaaaagcccgccataacagcgggcaggaggatttagaactgataaaccagacctaaagcgacaatatcatcggtagagatgccattggcagcgtagaagctgtcatcttcatccaacaggttgattttatagtcaacgtaggtggacatgtttttattgaaatagtaagtcgcgccaatatcggcgtatttaaccagatctttatcatcaacacctgccgggttgtctgcaccacccgcagcgtgcaggtcacggcctttagacatcaggaaagagactgccggacgcagaccaaaatcaaactggtactgtgcagtgacttcaaaattctgggttttgtttgccacagcataatcgctgtcgccaaacggggtcatattacgcgtttctgaatacatggttgccaggtaaatattgttagcatcgtattttagcccagcagtccacgcgtctgctttatcaccacccgccgcagtatggttaacctggtcattggtgcggtcagaagaggtgtatgccgcaccagcgctaaagcccatgcctaaatcatatgttgtggaaagaccccagccgtcaccgttttcatggcgaacatcacgtccgttgttggtgccttcctgaccattactggctccttcgttgttaccttgatactgcaccgcgaagttcagaccatttaccagaccgaagaaatcagtattacgataagtcgcgacgccattggctcgaccagtcataaagttgtctgcattggtataagagtcaccgccaaattcaggcagcatatcggtccagccttcgatgtcgtacattacgccataattacgtccgtaatcgaaagaaccgtaatctgcaaatttcagcccggcaaatgccagacgggtccatgactggttttttgaagattcagtgttgtttgcctgaatattgtattcccattgaccgtagccagtgagttgatcgttaatttgggtttcgcctttaaaacccagacgcgcatagctctggtcgccatctttcgctgaattatcagaaaaataatgcaggccatcaactttgccatacagatctaatttgttgccgtctttattataaacttcggctgcatgtgcagcacctgcggcgagcagggcaggaattaaaagtgccagtactttgcttttcattgaataaatcctttagttattttatttgccttttatccccatttcggggagtgaaaacatcctaaaggagaagttcagttagccgataaatatcatttgttacgccttaagtaaaaccttaatcaaataattcctctgaaatgataataagtctggtgaatgtatcgaagataatacatacaaaataaaaattatacttttaatttgctatacgttattctgcgcgggttatatgcctttattgtcacagattttattttctgttgggccattgcattgccactgattttccaacatataaaaagacaagcccgaacagtcgtccgggctttttttttagaattggataatccttatccagagcatttaatcggtgttgcttttttccgcttttccggccatttgtgccaggaagtcatagcgtttttgcaaatcagctgcagcatctttccataactgttctgccacttctggctgctgcgaattcagccgacggaaacgttgctcgtgaagtaacgtttcttccagtgcttctgacggcgggcgtgaatccaaggccagcggcagtttgccttcatcggcacgacgcggatcaaagcgatatagcggccagaagccggtagctgtgagttggcgcatctggtcgtggctgagtgccagatcgtaaccatgctcttcacacgggctataagcaatgatcagcgatggccccggatacgcttccgcttcctgaatcgctttcaccgtctggttcagctgcgcgccgagagaaatctgcgccacataaacatgaccgtacatcatcatactgacgccaagatctttacgcgctttacgtttgccgtgctcgccaaatttagttactgcacccagcggtgtcgctttcgacgcctgaccaccggtgttggaatagcattgcgtatccagcaccagaatgttgacgttttccgtcaaactcaatacatgatccagaccgccaaagccgatatcgtaagcccagccatcaccaccaatcagccagattgatttttccaccagtgcatctgcatcacgtagcagttcatgtgcttcggcaacatcgttgagttgctggcgtaaagctgcaacctgttcacgacgaacctctggcgtggcgtctgatttcaacgccgtcagtaattccgccgggattttatcggcaaattgatccagcagacgcagcacgcggacacggtgttgatcgaccgtcaggcggaaaccaaggccaaattcggcattatcttcaaatagagagttcgcccatgccggcccacgaccgttggcatcggtggtatacggtgtagagggcaggttaccgccataaattgaagaacagccagtggcgttagcgatcaacatccggtcgccatagagctgagtcagtaatttaatatacggcgtctcgccacaaccggagcaagcacctgaatattcaaacagcggtgtaatcagctgcgatgtacgaatatcaatacgttccagtttgctacggtcgatttctggcaggttgaggaagaaatcgtaattgattttctcttcttcgacatgttccaggcgagacatcatattgatggctttaatctctggattctgacggtctttcgccgggcaaacttcgacgcacaggttacaaccggtgcaatcttccggtgccacctgcaagacatatttctgcccgcgcatatcacgcgatttcacatccagcgaatgcaggctggcaggggcgttttccatcgcttcaggcggcaccacttttgcgcgaatagctgagtgtgggcaagcggcaacgcagtggttacattgggtacagagttcctctttcaagatggggatctcttcggcgatattgcgtttttcccagcgcgtagtgcccatcggccaggtgccgtctggcggcagcgccgaaacggggagggcgtcaccaagcccggcgagcatcgcagcggttacggttttcacgaaatcaggggcggcatcggaaaccactggcggtcgattggcgctgtgcggatttaccggttgcaacggaacttcttctacggattcacgcgccagcgccagagcctgccagttgtgttccaccagatcctggcctttgctactgtaacttttggcaatcgcaccctgcaattctgcgagggcgctatcgccaggcagaatttgcgtcagatggaaaaaagccatctgcatgacggtattaatacgggccgccaggccacattcgcgggcgattttcgccgcgttaatcacatagaagcgcgcttttttctggtttaacacggcctgaacttcttgcggcaagcgcgaccacacttcatctgcgctgtacggcgtgttgagcaggaaaatgccgccaggttttaaacgctcagccatctgatatttatcgataaactgcaactggtggcagccaacaaaatcagcctgggaaatgagataagcggaacgaatcggctgttcgctcactcgaaggtgagaaaccgtcaggccgcccgcctttttggagtcgtaaacaaaatagccctgtgcgtaccacggcgtggaattaccgataatcttgatattgtttttggtcgcggaaacgctgccatcactaccaaggccataaaacaaggcttccagtttcgccgagtttggcagggtgttttccggcaacggcagtgacagattggtcacatcatcgtaaataccaaccgtaaagcgcgctttcggtttagccgcgttgagctcggcaaataccgccagtacacagtctgggccaaattctttggatgaaagaccatagcgcccaccaatgacacggggcagagtttcgcgctcgccattattaaaggcttctgccagtgcggtcattacatccagatagagcggttctgcctgggcaccgggttctttggttctgtccagtaccgccacgctgcgtacggatcccggcagagcttgcagtaaatgtttagcggagaaggggcggtacaggcgaactttcagcacgccaactttttcgccacgggttagcaattcatcaaccacttcttcacaggtgccaatggcagagcccatcaggataatcacccgttccgcttgcggatgcccgtaatattcaaacggctgatactgacgacctgtcgcggcagagaaatcattcatcgcctgttcaacatggtcatagaccgcgttgtaccatgggttggtggcttcgcgagactggaaataagtgtcaggattggcggacgtaccgcggatcaccggatgttccgggttgagtgcccgggcgcgatgagcatcaatttcgacctgcggcatgagatcaagaatcgtgtcatcggccagcgggacaattttattgatttcgtgggacgtgcggaaaccatcaaagaaatgaataaatggcacgcggcttttcagcgtcgcgatttgcgaaatgagagcaaagtcttgcgcttcctggacgtttgctgcacacaacatcgcgcaacccgtctggcgcaccgccataacgtcggaatgatcgccaaaaatagagagtgcatgtgtggcaacggtacgtgccgctacatgcaggacaaacggtgttagttcgcctgccagtttgtacagcgtcgggatcatcagcagcaaaccctgcgatgacgtaaacgatgttgaaagggcacccgtctgcaaagcgccatgcacggtagcgatagcacccgcttccgactgcatttcaaccacgcgtggtgtgtctccccaaacgttctttaagccgtttccggcccaggcatcagcctgttctgccatcgtggaactgggggtaatagggtagatggcgataacttcactggtgcgaaatgcgaccgaagcaaccgcgccattaccgtcaatagtaatcatatgacacccttacattgcgcaaatgaggggcgcacgaaattgctgcgcgcccagtagtaatctttcaattttagcaaatggctttcttctgcattttcgcttttgtgtcccccacatcagcgtaatgaatgttttgatcaaacagagggcaaaaaaatagccataaaaaagtaaaaatgcggggcaacgcgcaggacagctctcgacgccgccctctgtgctgcctattatttatggcggtgtcgtttggcttgaagatcagaggaagaaaagatgcgagcagcgttttgggtagggtgtgccgctttattgttgtcggcgtgtagtagtgaacctgttcagcaggcgactgccgcgcacgtagcgccaggtttaaaagcgtcgatgtccagtagtggagaagcaaattgtgcaatgatcggcggttcgctttctgttgcccgtcaactggatggtacggcgattgggatgtgtgcattacccaacggcaaacgctgtagcgaacagtcacttgccgccgggagctgtggcagctattaattcattaaatccgccagcttataagttaatgtctgttttgcggtcgccagcgttaactggttcgcggtcagatccacttgtgcaccttctttcagcatttcgctaatggtgttatcgagttcattaagctgcgggttagcgcacatcatacgggtcattgccagccctttggctgtcagttcaccattagacagtttgccttcaccgctaaagcggttacacatgctgccggaaatcatcattttttcaccaaagctgatttctggcggatttttatcgctggtcacgggcttaccgtttacgctttccagcacaaagcgatgatgctgtagctgttctggcgtaacagcaattttgtcattacttacacatcccgccatcagcaggcttagcgcaacaaacgcggctactttcttcattgtggttctcaattacagtttctgactcaggactattttaagaatagaggatgaaaggtcattggggattatctgaatcagctcccctggaatgcaggggagcggcaagattaaaccagttcgttcgggcaggtttcgcctttttccagattgcttaagttttgcagcgtagtctgagaaatactggtcagagcttctgctgtcaggaatgcctggtgcccggtaaacagcacgttgtggcaggcagacaggcgacggaatacgtcatcctggatcacgtcgttggatttatcttcaaagaatagatcgcgttcgttctcatacacgtccatacccaacgaaccaattttctgatttttcagcgcttcaattgctgcctgagaatcaatcaatgcaccgcgactggtattgacgatcatcacgccatttttcatctgttcgaaggcggcttcgttcaacagatgatagttttccggtgtcagcgggcagtgcagagagataacgtctgattcagagaacagggttggcagatcgacatactccacaccgagttccagcgccgctgcacttggatacggatcgaacgccagcagacgcataccaaaacctttcagaatgcgcagcatcgccacaccgattttaccggtaccgataacgcctgccgttttgccatacatagtaaagccggtcagaccttccagagagaagttagcatcacgggtacgctgatacgcgcggtgaatacggcggttcagcgtcatcatcataccgatggcgtgttcagcaacggcctctggatcataggctggaacacggactactttcagccccagttcttttgccgcgtcaaggtcgacgttattgaaaccggcacagcgcagggcgatatatttaacgccgtgctttttcagctcttccagcaccgggcggctgccgtcatcgtttacgaaaatacataccgcttcgcagccattggcagttttagcggttttttccgtcagcagaaagtcaaaaaattccagctcaaagccaaaggactcgttcacctgttgcaggtacttcttgtcgtactgttttgtgctataaacggcgagtttcataagactttctccagtgatgttgaatcacatttaagctactaaaaatattttacaaaatttcaaatttaattgaaagctatggcgatattgaaaaattcatcaacaactatgcttagtgtaggcgcaaccttcaactgaacggttaaacatgccacaatacccgtattgaatgcttaatttttcgctaaatcaggatattaactacccatgctgggtaaatataaagccgttctcgcgctgttattactgattattcttgtgccgttgacgctgctgatgacgctcgggctgtgggttcccacgctggcgggcatctggctaccgctcgggacacgtattgcattagatgaaagcccacgcattacgcgtaaaggtttaatcattcccgatctccgttatctggtgggagattgtcagcttgcgcatatcaccaacgccagcctttcacatcccagccgctggttattgaacgtcggcacggtagaacttgattctgcttgtctggcgaaattgccgcagacggagcaatcgccagccgctccaaaaacactcgcgcagtggcaggccatgctgcctaacacctggatcaatatcgataaactgattttttctccctggcaggaatggcagggaaaactctctctcgcattaacctctgatatccagcaactgcgttatcagggcgaaaaagttaaatttcaaggccagctgaaagggcaacaacttacagtcagcgaactggatgtcgtcgcgtttgaaaatcagccgccggtaaaactggtgggggaatttgctatgccgctcgtgccggatggacttcctgtaagtgggcatgctactgcgacgttaaacttgccgcaggaaccgtcactggtggatgccgagctggactggcaggaaaatagcgggcaattgatcgtgctggcacgggataacggcgatccgttgctcgatttgccgtggcaaattactcgtcaacaattgaccgtaagcgatggtcgctggagctggccgtatgcaggttttcctttgagtggccgactgggtgtcaaagtcgacaactggcaggcagggcttgagaacgctctggtcagcggacgactgagtgtgctgacccaggggcaagcgggtaagggcaacgcggtgcttaattttggcccaggaaaattaagcatggataacagtcagctgcctctgcagctgaccggtgaagcgaaacaggcggacctcattttatatgcccgtttacctgcgcagctaagtggaagtctgtctgacccaacgctgacctttgagccaggcgcgttacttcgttcaaagggaagagtcatcgattcgctggacatcgatgaaatccgctggcctttagcgggtgtaaaagtcacccaacgtggtgttgacggacgtttgcaggccatcttgcaggcgcatgaaaatgaactgggcgatttcgtgctgcatatggatgggctggcgaatgattttctccctgacgctggccgctggcagtggcgctactggggaaaagggagttttacaccgatgaatgccacctgggatgtcgcaggaaaaggtgagtggcatgacagcacgattacgctgaccgatctctccaccggtttcgaccagttacaatacggtacgatgacggtagaaaagccgcgattaattctcgacaagcccatcgtctgggtacgtgacgcacagcatccctcctttagcggcgcgctgtcactggacgccgggcaaacgctgttcactggcggcagtgtgttaccgccatcaaccttaaaatttagcgtcgatgggcgcgatcctacctatttcctctttaaaggcgatttacatgctggtgagattggcccggttcgggtaaatggtcgctgggacggtattcgtctgcgcggtaacgcctggtggcctaaacaatcactgaccgtattccagccgctggtgccacccgactggaagatgaacttacgcgatggtgaactgtatgctcaggttgcattttctgctgcgcctgaacaaggattccgcgcgggaggacacggcgtgttgaaaggcggtagtgcctggatgccagataatcaggttaacggtgtcgattttgtcctgcctttccgttttgccgatggagcctggcatctggggactcgcggccccgttacgttgcgaattgccgaagtgattaatctggtgacagcgaaaaatattacggctgatttgcaagggcgttatccgtggactgaagaagaacccttgctgttgactgatgttagcgtcgatgtgttaggcggtaacgtactgatgaaacaattacgtatgccgcaacatgacccggcgctgttgcggctgaataatctctcatccagcgaactggttagcgccgtcaatccgaaacaattcgccatgtccggggcatttagtggtgcactgccgttatggctgaacaatgaaaaatggattgtgaaagatggctggctggcgaatagcgggccgatgacattgcgactggataaagacactgcggatgcggtggtaaaagacaatatgactgcgggttcagcaattaactggttgcgctatatggaaattagccgttcatcgacaaaaattaatttagataatctcggtttattaaccatgcaggccaacattacaggtaccagtcgcgttgatggtaaaagcggtacggtaaaccttaattaccatcatgaagagaatatttttacgctgtggcgcagtttacgctttggcgataatctccaggcatggctggagcagaacgcacgtctgccgggaaatgactgtccgcaaggaaaagagtgtgaggaaaaacaatgaaaattttactggctgcgttgacgtcatcttttatgctggttggctgtacgcctcgcattgaagtcgctgcacctaaggaaccgatcactatcaatatgaacgttaaaattgagcatgagatcatcatcaaggcagacaaagatgtcgaagagctgcttgaaactcgtagcgatcttttctgaggtgatgatgaagaaaacattacttctttgtgcgtttcttgttgggctggtaagcagcaatgtaatggcattgactctggatgaagccagaactcaggggcgggtaggtgaaacattttacggttatctggttgcgctgaaaacggatgctgaaacagagaaattagtagccgacattaatgccgaacgtaaagcgagttaccaacaactggcaaagcaaaataatgtgtcggtagatgatatcgcgaaactcgccgggcaaaagctcgtagctcgggccaaaccgggggaatatgtacaagggataaacggtaaatgggtgcgaaaattttaatagcaaaaccgcaatatcgggataacgctacaggagaaggcgattgatctattttcctgaaacaaggtgaatattcaaaaactcctgtcaaattgccttttgccctgaaaaatgcatagtcaaatatctgttttaactaattggcgttgcagtacatgcaacgccaattagttagcggaatttacgtcgatactcgcctggcgtcatcccaaagcgttgcttaaataccgttgaaaaatgactctggtcagaaaatccccaatgaaagccgatgcctgccagtttttcatcatctgcggcatggcgaatcgcatctgcacaaaaatcgagacgacggttacgaatatattgcgcgactaccaaacctttatcggcaaacattcggtacaaactacgtactgacatacctgtctctccggctatccactccgggcgtaatatctcttcgcgaatattatcgtctatcaacgtaaccactttttgaaactgacgttcacgacgaggttgaacagattcccgctgatgaagtaccgggcgcagcagacacaccatcgcctgtagcgcagcttcactttctgtttcagaaagtgccggattattcatgctctcctgtaacaggcgatgactgagttgcaccatgggtaagtcagcgtccagtctttctgcgcagacaggtttttgatggggaaaatattgttccagcagagtgcgtggcaaaagtaatgaaatctgtttagaagactcctgccagtaaagcgaacaggggcgtgaggcatcgagtaacgtaatatcgccagcgccaatctgcacctgacgctcatcctgctccattattgcctgaccactaagctgaaaaacggtgtaaaaccaggcatcgtcgctgccttttacttcctgccaggtgcgggataaattcaccccgctggttgtcacggtactcagctttagtcctttggcaaaatgcgtgtccagtacacccgtgtaacgctcagtcagcaggcgtccggtaaaatttccgcatacctgattgatttgggaaagccattgctgaaactcattatccactgcggggttcatggcacgttttcgctctgtgaaatgtatttttattgttgcatttgtgttgcaataaacgaagctaatgagcctgactataggaaataagtcttgtcaggcatagagacataagcggttattgtcacgatttgcggagcttgtcacagctgacaaagcgaatgtcacagcgaaaaaagtgacttttcttgtcgctgcgtacactgaaatcacactgggtaaataataaggaaaagtgatgacagagccgcatgtagcagtattaagccaggtccaacagtttctcgatcgtcaacacggtctttatattgatggtcgtcctggccccgcacaaagtgaaaaacggttggcgatctttgatccggccaccgggcaagaaattgcgtctactgctgatgccaacgaagcggatgtagataacgcagtcatgtctgcctggcgggcctttgtctcgcgtcgctgggccgggcgattacccgcagagcgtgaacgtattctgctacgttttgctgatctggtggagcagcacagtgaggagctggcgcaactggaaaccctggagcaaggcaagtcaattgccatttcccgtgcttttgaagtgggctgtacgctgaactggatgcgttataccgccgggttaacgaccaaaatcgcgggtaaaacgctggacttgtcgattcccttaccccagggggcgcgttatcaggcctggacgcgtaaagagccggttggcgtagtggcgggaattgtgccatggaactttccgttgatgattggtatgtggaaggtgatgccagcactggcagcaggctgttcaatcgtgattaagccttcggaaaccacgccactgacgatgttgcgcgtggcggaactggccagcgaggctggtatccctgatggcgtttttaatgtcgtcaccgggtcaggtgctgtatgcggcgcggccctgacgtcacatcctcatgttgcgaaaatcagttttaccggttcaaccgcgacgggaaaaggtattgccagaactgctgctgatcacttaacgcgtgtaacgctggaactgggcggtaaaaacccggcaattgtattaaaagatgctgatccgcaatgggttattgaaggcttgatgaccggaagcttcctgaatcaagggcaagtatgcgccgccagttcgcgaatttatattgaagcgccgttgtttgacacgctggttagtggatttgagcaggcggtaaaatcgttgcaagtgggaccggggatgtcacctgttgcacagattaaccctttggtttctcgtgcgcactgcgacaaagtgtgttcattcctcgacgatgcgcaggcacagcaagcagagctgattcgcgggtcgaatggaccagccggagaggggtattatgttgcgccaacgctggtggtaaatcccgatgctaaattgcgcttaactcgtgaagaggtgtttggtccggtggtaaacctggtgcgagtagcggatggagaagaggcgttacaactggcaaacgacacggaatatggcttaactgccagtgtctggacgcaaaatctctcccaggctctggaatatagcgatcgcttacaggcagggacggtgtgggtaaacagccataccttaattgacgctaacttaccgtttggtgggatgaagcagtcaggaacgggccgtgattttggccccgactggctggacggttggtgtgaaactaagtcggtgtgtgtacggtattaatctggttcgctcataagtaaaaaacggcacctggtgccgtttttttgtctgaaacaatcacttatctttcttcagcgcccctagcgttggcgtttcgtcaaagaagttccatggtttcagcagagtatgtacccattcggtcggcataatcggccactcttcggcgcgggccacatgtgtggtgccggtggtcatccagacaacggcgtcggtgttgtccagcgactcgttatccttactgtattgtccaagaccggtgtcatgagtagaacggttcggatatttgccttccgggaaacgctcgccaggatgataacgcgttacccagagctgcttgtccataaagcttaaacgatgatagatccactcgtccggcgcgaactgggcaccttttgctaccgggtgagtaccacctgcataaggaataatttgataggaaaccggattgcccatgcggttctctttgttcgggttactcaacagacgaatcgtgcccggatcaaatttctgtgcggcatcctgttcattgccgatgttgtactgattaacttgcatggtactggtgcgtgggccaccggcagtattcggttttaccactgggtccatcgccaccaggctgttattctcgccatctacatccagatcgaggcggaaattataaatatgttggtgtgtagtacccacgatattgtgatcgataagcgtgccgtagcgcgtgtcatct

(The sequence listing continues in the following parts.)

What is claimed is:

1. A bacterial vaccine comprising a live avirulent bacteria, wherein the bacteria is cured of plasmids and/or transposons that contain antimicrobial resistance genes.

2. The vaccine of claim 1, wherein the bacteria is a Gram negative bacteria.

3. The vaccine of claim 1, wherein the bacteria is E. coli.

4. The vaccine of claim 1, wherein the bacteria is cured of plasmids that contain antimicrobial resistance genes.

5. The vaccine of claim 1, wherein the bacteria has been cured of at least one AMR gene selected from the group consisting of cm1A1, sul3, sul2, aph(4)-Ia, aac(3)-IV, aph(6)-Id, aadA2b, aph(3″)-Ib, aadA1, mdf(A), mef(B), aadA2b, aph(3′)-Ia, and any combination thereof.

6. The vaccine of claim 1, wherein the bacteria is an E. coli strain or strains selected from the group consisting of an F18 fimbrial adhesin positive strain, and F4 fimbrial adhesin positive strain, or any combination thereof.

7. The vaccine of claim 1, wherein the bacteria is an E. coli strain that is F18 fimbrial adhesin positive.

8. The vaccine of claim 1, wherein the bacteria is an E. coli strain that is F4 fimbrial adhesin positive.

9. The vaccine of claim 1, wherein the bacteria is an E. coli strain with a genome that has at least 90% sequence homology with an E. coli strain that has been cured of at least one AMR gene selected from the group consisting of cm1A1, sul3, sul2, aph(4)-Ia, aac(3)-IV, aph(6)-Id, aadA2b, aph(3″)-Ib, aadA1, mdf(A), mef(B), aadA2b, aph(3′)-Ia, and any combination thereof.

10. A non-conjugative synthetic curing plasmid comprising incompatibility and/or addiction elements that are the same as the incompatibility and/or addiction elements contained in the plasmids and/or transposons that are cured from the bacteria of claim 1.

11. The curing plasmid of claim 10, wherein the curing plasmid comprises at least one antimicrobial resistance gene that is not contained in the plasmids and/or transposons that are cured from the bacteria of claim 1.

12. The curing plasmid of claim 11, wherein the antimicrobial resistance gene is selected from the group consisting of cm1A1, sul3, sul2, aph(4)-Ia, aac(3)-IV, aph(6)-Id, aadA2b, aph(3″)-Ib, aadA1, mdf(A), mef(B), aadA2b, aph(3′)-Ia, and any combination thereof.

13. The curing plasmid of claim 10, wherein the curing plasmid comprises at least one antimicrobial resistance gene that is not contained in the plasmids and/or transposons that are cured from the bacteria of claim 1, and wherein the plasmid comprises at least one negative growth selection gene.

14. The curing plasmid of claim 13, wherein the antimicrobial resistance gene is selected from the group consisting of cm1A1, sul3, sul2, aph(4)-Ia, aac(3)-IV, aph(6)-Id, aadA2b, aph(3″)-Ib, aadA1, mdf(A), mef(B), aadA2b, aph(3′)-Ia, and any combination thereof.

15. A method of treating, preventing, or reducing the severity, duration, or incidence of clinical signs, of a virulent bacterial infection comprising producing the vaccine of claim 1, and administering the vaccine to a mammal.

16. The method of claim 15, wherein the bacteria in the vaccine is an E. coli strain or strains selected from the group consisting of an F18 fimbrial adhesin positive strain, and F4 fimbrial adhesin positive strain, or a combination thereof, and wherein the mammal is selected from the group of swine and cattle.

17. The method of claim 15, wherein the bacteria in the vaccine has been cured of at least one antimicrobial resistance gene selected from the group consisting of cm1A1, sul3, sul2, aph(4)-Ia, aac(3)-IV, aph(6)-Id, aadA2b, aph(3″)-Ib, aadA1, mdf(A), mef(B), aadA2b, aph(3′)-Ia, and any combination thereof.

18. A method of preventing, or reducing the risk or incidence of, transference of antimicrobial resistance genes from a live avirulent bacterial vaccine to human pathogens comprising producing the vaccine of claim 1, and administering the vaccine to a mammal.

19. The method of claim 18, wherein the bacteria in the vaccine is an E. coli strain or strains selected from the group consisting of an F18 fimbrial adhesin positive strain, and F4 fimbrial adhesin positive strain, or a combination thereof, and wherein the mammal is selected from the group of swine and cattle.

20. The method of claim 18, wherein the at least one antimicrobial resistance gene is selected from the group consisting of cm1A1, sul3, sul2, aph(4)-Ia, aac(3)-IV, aph(6)-Id, aadA2b, aph(3″)-Ib, aadA1, mdf(A), mef(B), aadA2b, aph(3′)-Ia, and any combination thereof.
